United States Patent Application Publication US 2026/0191916 A1 - sequence listing, part 88

SEQ ID NO: 586 - DNA, 430808 bp, Bacteroides ovatus
  source 1..430808: mol_type = genomic DNA
gctaaagaagcagggcattgatgtggtattccgtcagaacgacaacgggcgcatctatggcgttacgttcatcgaccacgacagccgggtggtgctgaacggttcacgcttgggtaaggagtattcggcgaacgtgttcaacgaacgtttttcgggcgaaaccggaaagatacaccagtccgaagtggcagcaccgcagcaagaccagcccacgcatcaggaacagccgggcttcacgccgaaagccgacatcgtttcgggcatggcttccgtgctgggtgctttcggcggtttgctgggcggcggtgcatcaggcggtgacgagccgcaggacaccgactgccaaaagagaaagaagaaaaagaagcgcacaaggcgcatcaactaacttaaaaacattacaatcatgcaacaggaagatgatttgagagggcttgcaagggtcatggactttatgcgggctgtcagtattctattcgtgggaataaacgtgtactggttctgttactccaccctgaaagaatggggagtgacgtttgaggtgatagacaagatactgtggaacttccagcgcaccaccgggctgttctcgtctatcttatggacaaaactattttcggtggtgttcctcgccctgtcgtgtatcggcactaagggcgtgaaagaggaaaagataacgtgggcgaagatacattgcagccttgcggcgggtgtcgtgttgtttttcctgaactggtggctgctggaacttccgctgccacatacggcggacactgtgttttatatcgccacgctgtcggcgggctatatctgtatgctcatggcgggtacgtggatgtcccggttattgaaaaacaacctcatggatgatgtctttaataccgagaacgaaagtttccagcaggaaacaaggcttatcgagaacgagtattctgtaaatctgcctacccggttctactataagaagaagtggaacaatggctatattaacgttgtaaacgtttttcgtgcgagcatcgtgttaggaacgccgggcagcgggaagtcatacgcagtagtaaataattacataaaacagcaaatcgagaaaggttttgcgctctacctgtatgattataagtttcctgacctttcggaaatcgcttacaatcatttgcttaaccacttggacggctacaaggtcaagccgaaattttacgttatcaactttgacgacccacgcaagagccaccgatgtaaccctataaacgccagcttcatgtcggacattgcggatgcttatgaagccagctacacgattatgcttaacctcaatcgaagctggataagcaagcagggcgacttcttcgtggaaagcccgattatcctgcttgcagccattatttggtatttgcgcatctatcaaggcggcaggtattgcacgtttccccatgccatagaactgttgaacaagaaatacgctgatgtattcacgattttgcgcagttatcccgaactggaaaattacctttccccgttcgtggacgcttgggaaagttcggcagttgaacagttgcaggggcagattgccagtgcaaaaatcccgctttcaaggatgatttcacccgccctttactgggtaatgacgggcgatgatttttcacttgacatcaacaacccgaaagagcctaaaatactggttgtcggcaacaatcctgaccgccaaaatatctactcggcagcactgggattatataattcccgtatcgtgaagctgataaacaagaaaggtcagcttaaaagttcggtgataatagatgaattaccaactatatattttcgggggttggataatttgattgccaccgcccgaagcaacaaggttgcggttctgttaggctttcaggattacagccagcttacccgtgattacggggacaaggaaagccgggttatccaaaatactgtgggtaacgtgttcagcggtcaagtagtcggtgaaacggcgaaaatcctttccgagcgtttcggaaaggtgttgcagaaacggcagagcatgacgataaaccaacgggaaaaatccacctcgataagcacccaaatggacagcctgatacccgccagcaaaatatccaacctcacgcaaggtatgttcgtgggtgctgtggcggacaacttcgatgaacggatagagcagaagattttccactgcgaaatcgtggtggacaacgaaaaggtgaagcgggaaaccgcccattacgtgaagttgccgcagattatcgacttcaccgacaaggacggcaacgaccggatgcaggaggagatacaagccaactatgaccgcatccgtcaggaagtcaggcagatagtcgagaacgagataacccggattaagaacgacccggagttatgccacttgattaaggaggaagaatagctatatataataatgtatggagtgaagaacagccgatgtagctttacggttgttcttcattttgctttttggtgcggtaggcttcaaaacgcactaatatttcgtgcaggttcttcaatgcttccacagccttgcctatcggcggcatcttgcttttgtcgaaagtcagtttcttcaaatcggtagtgtacgccgtagccacttcgggtaacgccatgaccgcttcggcatccttgaatatcggtgcatcagccagcgacaagtgcgaacgggagtttttatttagtccgtcctctatcgtcacccggtacatggcatccaagaaatcttccgaatgtaggtaatcgttatattcctgattgtggtagagtgccgacaagtcgtaaacgtcacggatatgctttgccaacagtgcggctgcatcctcattgtaagacagctttaccagccttgaaaccttgtcgcagatagtctttcgggggttgatacactgcgtttcaaaactttccagcccgtaggtgcttatcagttcctcttgcccgatgctttcaagaaaggcggtcacaatcggtttgataacccgcttgtccgccgggtagaacatcagttttttgtccggcaggtcacaggattttatctctacttccaaatgttctttcagtcccacgccttgaaatacattgtcatacgagaaatacagtttacggtaattaccgcccgtttccgacaaatcttccttgtatatgtcactattgagttcggctatgtatttggaaagtttcttgttcaatgtcttttctgcctgcttggacgcacctttatcacccgtgaacacgaacaagtccaaatcttccgagaaacgttctatcagcccgtaggctttggaaagtgaagttccgcctttgaagtaggtcttatccgcatattcggacatggaaatatcccgcagtatcttcgatacccagtaatccttttccacgtgcgactgctcgtagccgaaatggtcagccgccagtgcgatgatttccttgaacgcttccttgtccgaatgtaaattcatatttctgtcctatgctgttttataatccaagttgaaccgtgtcgtgggaagaatggtctttgccatttccgtttgcaatacggtttgtctgatgtcgcccagtatatccgccaccacctttctgacacgtggcgggtaacttttcgccaaagatacgattttttccagttccggcaggctgtacccgttgaaatattggcttttgacccggttgtagatgtcctgcccggttgttccgggtatgcgcttcatgtcctttatcgcatcgagcagccgcaagtacgggacaaggctttcatccggatagaccatgcagtaggctttcacgcactctatatccaagttcttgaaacggaaacggcgaaccgggttaggagtggctatcgttatggttgtggctacctgttcggtcagccccattttgttatagatgtaagcccccgtgatatagccgttcagtttttcagtcaggtagcggaactgttcatcctgatagacaggcagctttcccagccccagcactgatttcttgggacggtagtacgcccccttttcaacccgtaccagtacccctttgcggctctgttcggaaagtagcaccgcaacattggcggtcttttccgtttcaaacgataaatcccggaacgtgaatatacgcccggtatctatccgttcaatctgcccaagtatctcttttctgaatgaagccatatttatgtcctttgtttctatatgcaaagatagtatattatgtaatcacctgcaaaaacataacaaagattttgccgaagatgttttctttttgtcgtgtcacctgataataggagaataacggaaactcaatcaaaggcttgccatacgcttcataaacgcttcacaaatggctcacaagtataatgcgatttttgtaaaactgttgattataagccgaaaacaatatatacaaatggctcacaaatggctcgtttaaagcaagcgattaacttcggtctgtacccgttttaaatctccaaccaacagttggagatttaccgcacccggataatttcaagctccgcaggacaaattcgggcatcccttgcccccgtttttagtcgctatctgtagactggactattattataccattcaataatcaaatcattatcgttattatggacatttaaagtgaaaaagatattcctataatgattaaagcaatagatgcaaatatgtatctatatctttttgtagaaaacattgctcctatacaagagatagatacagcaaattgcatacattttaaacttaactctgtagtcttaaatatacacatagacaaaaaagataatgccaaaacaaatagtatagcattcaatatatatttcagtttcatattcctttgatttacattgaccttattagcagtagcatataaattgctcatcctaacccaataaccaatcctatacaaaagaacaaggtgaatctcttttccttgtgtttcagcccatagaccagcccgataatagcacataaaggaatattagatgaatctgcattttttcctttatttacaaggtatttatgactttctttgctcaatttgcaaatctcacggttctcattgttctgttgtagcatacatttatgcaacttaatgttcccatgattcagtttaatctattttctctaattcaattgtagctactttctctttatctggactaatttcattctgtataatggttatatgtttttgggtatagcttttgataatccaaggggctccacccaaatataaagcattgctattaaatgtgatatatttcccttctattgtataagtaatatcaatttcatcgtaaccttcccaatttactttccctttccgagtatctacaaattgcataccgacccccatattttgtactgtccaagcctcacaatgccctgttccacgccatgaagtctgataaagtgcttcgggggttaattcatttgtctgttcattatcatcgtcgcagcttataaagctgaatgtacagaggaatagcataagtattccaagaatttcttttgttttcatattcttttttttaatctcttgtttaactcattcaatctttattttgtctcttcgttgaaccaaccaaagataagacaaagataaaaagaagaattctttggcagattaagatactcttggaatattgttatgaatgtaaatttctaaacctatgtttattttttgttgtcaaaactttgcttgcgtctgattcggctcatgtgtatgggtgtaattttaaggtaggatgctatttcttttagtgataccatttgaaggattgcagggcatttttttaaaagttggaggtaacgctcttccggtgtgaatctgaataaatccaaataacgtgaatatgattggaaaaacatctgttcggctgcgatacgggctatccgttggttttcattattttccttgaatttttgctgtaagaatgtagaagaacagatgtaaatctcgcacgggattatcgcctgtatattcaattctgatttcatgccatataagcaagtgggataatcggctataaattcatttggaaaggaaaaaccgacattatacggcttgttttctgtccggttggtgcaactgtatttgactacgcctgataagataaacccgaagaaagaacaggcatcaccttcatggagaataaactcattctttttataatgtcgtaactctccatgtttcagacacaactccttgaagaagtctatgtctatgttactcatatatgaattgaattcggctatcatttgtatataagagaaatgtataaaaaatatctgaatttccatgtttggagtttagtctgttttttgtctatatatccaaaccgtactaaacttttttctgttgactgcaagatataagtactggcgaaaagagtaagaataaaaggtatttctttttgacagtattacttttaataatttgaggaggaaataatactctaagtaaaggcttattctaccgtccgagagcttattttgctccagcttggggttttctttcgttttattttctaacattgccattgtttagaggttttatctcgatttaggtgccgtaaccgggtaattacactaaatagttgattttcttttgttttctgcggatgcaaaggtacaaaagaaaatgatatttcaaagtgtactgaataacagaaaatggcaaaaatagagaaaaacagaaaatattcaaatgactgataataagaaagatgaattatttttattctataatctccatgtcttgtatcggcattggcattgggtggtaaagaagcaatagataacatccatattctaaaaactattccctacatagaaatgtcactccaatctatcggggatttgaaacgagtgcaataacagattactaacgaagcgcgatgacgcttaaacagtgttccccgctaatccattaaagggttcacatatggttcatactcgaatgattttcttttgcaaaatatgcaaattacttgagttttagctatttcaaaaaacgaccaaagggttcacaaagggttcatcgaaagagagtgaaatcattcactctctttttttatgcccttttcaattctgcaaccaatggttgcggaatttcatcccacccggacaaatcgggacaccgcaggacaaattcggacagcccttgccgcccgtccaaatatagcatatttagtcgctacctttgggcgggactattcccgtaaccactaaaattccaattatttatggcaaacagaatgaccccgcccgcagaggggcaggaaaaagacgtgctgctggtcttggataaacagcagggcaaggtgagtgccgttaagggtatcgacaaggagggcaatttgcagaccgtgccgccgacacacggcggcgagttcatgcaggtggacaagaacagcgatgtgttcagcaacttcatttccaacttctaccgcaagtatcaggacacttccgggctggaactgttcagcgtcaaggcttccgaagcggagcgggacgcaaaggcaatcgaggacaaccaccgcaaccctacaccggagggcaacaagcgggctgaaatgcttcgagttccgaagcccgacttccacgagttcaagcagggctaccgcttcgacccgtcaaaaatcgactgggagaacctgaaaaaagtcggcatcaccgccgacaccctgaaaaacacgaaggacttcgaccgggtgatgcgtggctacaagtcccgcaacacctacaccgtttcggggacggtgggcggcttctacctcaaacctaccgatgtcaagctctctttctatcaggctaaggacggcacggtagtccccaagctgcacggcgtgcagcaggacgagaaactgttgcaacgcccgttccatgaacacgggttcaccaagcaggaacagggcaacttgcaaggcactggcaacttgggcggcatcgctgaaatcaaagacccgaaaagcggcgagcaaatccccgtgttcgtcagccgggacaggtacacgcacgaactggagtatatgcgggctgacaagtggaaatgccccgatacaatctgtaacgtgcaagtcagcccggagcagaaagccgcctttgaagccgggcaagcggtgaaaatggaaaacctgcaattcagggacggcacgaagcgcagtgcctatttgcaggtcagtgcggtggagcgtggcttggagttcctgccccgtgccgccgtccagttcttgcagcagggacagcagcccgcagagcagcaggtagccgggctaaaggacggcaagggcgttgagttcaacggtcatgtacagcccggcgcacagggcaaatcccccgacaaggtgcagccgaaagacgttacccccgccgccgagagccggacgcaggtagcggtcaattcggggggcaagaccaacgaagccaccaagcagggcaaagagccgctgaaacagggtcaggacaagcccaccgccaagcagaaagagaagcaggagaaagcgcaggacaagagcctgaaagcggacaagcccaagaagtccagaggaatgaaaatgtagtacccaccttaaaaagtaaagaattatgattgcattgatagcagagaagcccagcgtggcaaaggacatcgcccgcatcatcggtgcgaccgggcgtaatgacggttatctttccggcaacgggtatatggtgacatgggcgttcggccacttaatccagcttgccatgccggaagcctacggcgtggcgaacttccgcagggagagcctgcccatactgccgcccgatttccagctaattccccgtcaggtgaaagcggagaaaggctacaaggcagaccccggcgtgctgaaacagttgaaagtgataaaggaagttttcgaccagtgcgacaagattattgtcgccaccgatgccgggcgtgagggtgagctaatcttccgctatatcttccattacctgaactgtcggaaaccatttgtgcgtctgtggataagcagtcttaccgacaaggcaatccgtgaggggctggataacttgcagccgggcgaatattacgataacctctacctttctgccaagtcccgcagcgaagcggactggctgatagggataaacgccacccaagcgttgagcgttgccgccgggcagggggtgttctcactgggcagggtgcagacacccacgctcgtgatgatatgcagccgctatttggagaacaagaatttcgtacccgccaagttttggcaactcaaagcggcgaccgccagcggggaaataagtttcaccgcccaatcgaccgccaagtgggaacagcagcccgaagccatagccgccctgcaacgggtaaaggatgccgggcaacttgtggttaaatccgttgagaggaaagaagcctgtcaagaaccgccgcttttgtacgaccttaccacgctgcaaaaggaagcgaacacgaagctgaacttctcggctgacaagacgctttccatagcgcaaagcctgtatgaaaagaaagtgatgtcctacccccgaactggaagccgctatatcccggaggacgttttcgatgaaatgccggaacgtgtcgccctgctggggcaatacccccgctttgccgggtatgccgccgggctggacggtgcggcactgaaccgccgcagcgtgaacgatagcaaagtgaccgaccaccacgccttaatcattaccgagaacctgcccggcgaactttccaaagacgagcgggcggtttacgagctggtagccgggcgtatgctggaagccttttcgggcaagtgcgtgaaagacgttaccaccgccttgctgtcagggggagataccgacttcacggtgaaagggtctgtgatgaaagaagccgggtggcgtgccgtgttcggcgagcaggaaacgggcggggatgaagaagccgccagcctgccgccactccaagagggagaatatttgccactctccggcgtggatctgctcgaaaagcagaccaagccgaaaccgctgcacacggaaagcagcctgcttgcggcaatggagaacgccggaaaggaactggaagatgccgaactgaaagccagcctgaaagatgccgggataggcacacccgccacccgtgcggcgattatcgaaacgctgttcgcccgccagtacatcgtgcgtgagaagaagaaccttgtacccaccgacaaggggcttgccgtttacaggattgtcagggacaagaagattgccgatgtcgaaatgacgggcatgtgggaaaccgcccttgccaagatagaagcgggcagcatggatgccgacatgttccgaaagggcattgaggtgtacgccgctcaaatcacggcggaattgctatcggtgcagttatctatcgccaatggcgaaacttgttcctgccccaaatgcaataacgggcgcatcctgttctacccgaaagtggcgaagtgttccaacgtggactgcacgcttaccatattccgcaacaagtgcgacaagcagctttccgacaagcagattgtcgagctggcgacgaaacgcaagacagggctaatcaagggcttcaagggcaagaacggcaaggctttcgatgcttcgcttgtgctggacgaacagttcaatatcggtttttcatttcccgaaaagaaagcgaaaccgaagaaatagcctatctttgccactgaaatttcattgtgataggttttacaacttataataattgaaattttagtggttgcgcccggcgggaaccgggcgcattttttatacgctcccgccaaacaggtaggtcgaacagaccaccccgttatccagcaccctgctttccgagagtttccaatgtgagccgaatgtttccccgataaagccgatgcctttgcccgccatgactgggacggtgtagatagtcaggctgtccagcaatccggctttaatcaatgaagtaagcagcttgccgccgccaactaccaatatgtcggttttctgtttcagttcatagaccctttgcagcggttcttcggtcaggaactccacgccgcagtccggcgtcacgttggtgtcgtagtgtgacaccacaaaagaccgcttgcttttgtgcggccacccgccccagtgttcaaagatgtagttataggtgttcgcccccataagcaggcaatccgcatccaaatagtatttgccgatgatagcttttactttatcaggcaaccagtccagttcatagtccggcgtggcggtatgcccgtccagcgatacggcgatgtgcgctttgatttgttccatattgtcaggtattaaagtgatataaatccctactgtcttggcacgttagccgccaccccaaaaagaaagcgtggcatgacgctgtttcaaagtagaggtactggcatacccaaatgtggaaacagtgcagccacgctatgacaaacgcatagcatatcctgcgctgaatatccccacattttgaaaagtgccagttttctactttgggacgttcggcgaacgtatatgttatatataaaggcaatattccggcaaccgccgtccaactgccgttacttttttcgtgtaacttctgcaaagttaagcaaataccctgaattttcacgtgcaaacagaaaaaatcctgccgtgtttcacaacagggcaggacacaagcacatgaattacacaagttttatccatacgcttatggacaacttgtgttccatcgaagattatatgaaccgatgacaaaacagctttggttcgccgtgtctttggtgatgatgttcctttcccgcatgaagcggatatagctctttgcggtgcgttccttgatgtccaagacctgctgcaactgctcgcaaaggtctatgtaggtgatgcgtgtctgccgcccgaagatgtcacgtgcgacattcaccagttccctttccttgcgcttctccttttcctcacggggcttctcgcccttgtacacgtgcatcccggcttccttgtcccaagcaaagagcatcagaggaacgtccagcgggcttccgtcccttactttcagggctttcacgaccgactgggcgggttcttcgtctttctctatcgaaaggattgtagccgccttacgctgcaactcgctgcccaaatgtccccgcagtttcaagccgttcggtacaaagtgtagcacacaaagaatacaggtgttgtagatgcccgccaaccgataaagttcatctattaccgccacgctttccgcttcatcgttggcactcttaacaaggtcggcgatgccgtcaatgacgaccaactggatgccgccgtactggtagtaaaacttatccatgctctgcacaatggcgttcaggcgttccttgcgtgacatacccgtcaggcagaacgctttcagctcatcgggtttgtccggctgtttggcacgtgccagcaggttgcttacattcttgaacagttgcacttccgactgttcggtgtcatatagcaagaccgccttgtgcctgccgttggcggttatctgtatgcccagcgtatctatgtccgcaccagccgggcagatgcagcccgccacgattgcggctacataattgctctttcccgttccctcgcccccggtgatgccgaacaggttgccttgtgttcctaacggaacgtcacccgccgaaataatctcttgcgctttggcgggcgggttgttgaaatctatctcgcacgatttaagcataatcaatgtgtcgctatacaggttgtctaaaaattcgataaacagtttcaggaaatcttcacgggtgttcccggctttgaagtagtcggatatgtccttttcctctttcgttcccggaagcgggagcagcaggcgtttcacgccaaattcttccaatagtttttcctgcttgcgtgagctttccctgcccgtcttgtccatgtcaaagagcaggacgatgtgcttgaagcggaacgtcagccgataaaccagcgttggcggtatcgtcaccgtttcgctgttgaagcagatagcgtgaaaaccatgcgccgccagcgaaagcacgtctttctcgccgcccgtgatgaatagcgtgtcgcctttggcgggcagttgctccagcccgaaacagtagttttcgccgaagctgccgccatagaggaagcggggcgtggagaacgggcggtacagcttgatgtactgtttgcccttgtagccgtacatgggttctgccaccgatgaagtgtaggtgtacggtttgccctctgccgtttcgctgttgtattcccggagcgagcaaaccttgtaacgttccagcagttcgggcgtgatgccgtactgttgccagtacaccagttcggcaagcggaaatttctgttcccggaactggtagggcttgacgggcttttcgggcttttcttcgggtttgtccggctctgcccggcggacggttgccgggggaacggaaaccggagtgccggaagccagccccaagcccaaatcccggtcaatgatttccagtatctccacgaagtcagccgcccggttgcagtccagcccctttaactgccccacgaggaagaagcagtcgccgctgtaactgtcgttgccgaagtctttcatcttgtagataccgccccggcggtcgaagtagatgttgcaggaagccttgctgtcctcgtacagcgggttaaggaagttgcgacctatgcgccagtttccgggcaggtagtgtttgaataccgccagcccgttacttgttctttctaagatttcctctttccttagcatacagttggtggttggttatcaggttgtcgatgttctctttgttgctcctaatcaaacgttcttccagcatccggcgtatctcgctgaccttgtagaaataacgtcccctgatgttggaataggcgatagtccccgatacccgcaggcgttgcagggtcttttcgcttattttcaggaacgtgcagacctcgtagctgtccacccacatatcttcttcactttgttttgccttttctacatgattgaatatgtaatcggcaatggcagtaattttgttgtccagttccttgtaggctttggactcgaatgttattatttccataatggtaactaattgatttgccgcaaagttcgggtgtcctgaaaaataaaacgccacaggcgaacccacctgtggcgaaataaattttgttaaagaacggttgcctaatcctgttccctcatgcgcagcagcaacctgtctttcagggtggagaggaagcctgtgcggtctttggtcttggctttgagttccatgtaggtatggtagaagtcgccgaggtcgatgtcgaaaacgtattcaaaataggctacaatctccttaatatcaaccgttcccttgttcagacagccgcaggcgtccagtgcatagacaagctccaccaacgcccttttcgtccccgtccagcgtagcacctttcctgtgaagccgttcttcacccgcttgcgctgttcccggcgttccagttcgtgcagtcggttggtgaggtatatttccagcagttcgttggctaaaatcttggctaccttgaagtcgtgactggtgctgaactgtgggtctgtttcgtaatagaaactgtccacaatgatttgtatgtcaggcttcccacgcatgaaatactgcctgtccaagtaggtggctttcgtgcggtggtactggtagaacgccaagttccgctggaacgactttgaaatccggtcggtttccgacagcaggtagtcccgctgcacgtcctcgctgccgctgggaaagcgcacctctatcttgtaaacggtgttgtaatagatgattttgcttgctaaaagcggtttcagttccttgaagaagtgtatttcttcttccgtgctggcgaacgggtaggagattataaaggttttgagttcgcccagtatctcttgcaggtagtccacgcacaggcggcagagcgtcagcgtgtccgctgcggtgtcctcgtattcctgtatctgccattccactttttgaagcagtccggcgaagtatgtttccaacggtatcttatgttccataaccttgtgcttatcttttatgaagcacaaagttacgggcataaaaaatctgttttattcttgatttttcacattacgttcttgtaactgtgcattttcttgtttcctgcgcttttctgcgtatctcgcccggtgtgtccagcaagtaagccttgcagaagtcgttcaagttcgatgtcgatgcgaacccggtggtgaacgccacttcggtaagcgtgaggtttgtgttcatcaggtagtgttccacgtcctttacccgttcctttatcacccattctttagccgtgtacccggtcattttctttacctttcgccggaacgagccgtattccatgccgcatttatccgccagttgctcggcatcatagaccatgtagcctttcagacgtaccatttcggtgaacgtctgcctgcccagttccggcagcatccgttcggcgtggcgcagctccttttccgtcaccagcaggcggttgtcccttaccgggtttctccgcagcaggtggaaagcgtggcataccgtgttgtacacgttgcataggtactgccgtcccggtcgcatccagtggagcgcatcgcagtaggcggtcagttcgggtatgtcgtcccgcttgcggtgctgttccgccagttcgtccagtatggcgtaatgtgtggtggacatacccagcagaatgatgattgtcttgtagtccttgtacgccgccagtgtcggcgtttccggcaggcttttgagcgtgtcgcacacgtgggcgcacagccgcccgtccttgctgaacggttcaagttccaagtagttgtccattttccggctgttgtgcagcagccatgttaccttttcgtccagttccttgcaggacgcttccagttccgcttcgggagcgggcagcaatagtgatgtaatccgttgttccatatctgatgttttatatatgaatgacatatcatttgttccacctcacgcaatccgtccaaccccattcatcgaacagccatgtttctaagaagaaaagtacaaagggcagcaggaacagaaaatatgcctgtaatgcgctgatatgcttagagcggcggtagcggttcaacaatgcctgtacacgggctttcctgtatcgtgcaagaataaatacacaaataaacaaaaacattgcacctaaatagccaagatgtaaggacgaccattgcggtacattgttaatcaggagaaagttaccgggcagaactactatccaccaccaataccaaaacagcagtataaaacctgacatccgtcctatcttcttgccccaaacctctcccttgaaatataggtagtcaaaaaaatagtatctgtaattcgtccggtttgcacgctgcttcactcgttcaaaatagttatctgtcttttttattcctttattcataatggtttggtgagggaaagcgttcaggggttatctttccttgttaccaatgaatttacttttatatatagcgtactctactgtgtaagtagccagcttcacgcccaagaacatacctacaagcaatatatatgctactaagcaatattgattatacaagaggtcttttaagaatacaggtatcaataaggctatgattgtagcgttctgaaaccacttctgtactttcaataagaggttaatgtataaatgatttcctatgtaattgaacccccatttataattataccgtttcagataagatagtgaaaaccacaatcctacaagtgaagtaataagggctactcgccaccatgctcccatgtatgggaacataccttttaagaatgtcagcaaaacaacacctattatgctacattcatatacaattcttactcttgttacattattcatatatgtacgctattggttagaaaggagcatcgtcagatgctatctttctttgttactaactaattaaatctttattgtataatttttagccaatgacgatgtgttattataaaataaagtaatacaaccaaaatgggataaatcatccatgatatgaaggaagaaatcttttggctattaaatattagaggtttactccttataatttccataccttttttccttttgatataatacgaacagaatgtcttgtatagtaaaacatagattatgataaaaaacacaaaaggggttttataattgaaattctcctttatcagtagatacgtcaatactataacaggaagaaataatattccacatattatctgtatcgtccgctcatgtggattttccaatataaatttatccctattaaatatgaatatctgataatacatcgcatctaaaatgaattttgtcataaagagttattcgtattgttagtaatggtttggaaaggaacaccgtttaggggttagctttccttgttatcaattctatattcttcatattcaagaaacgcagtatcaacatctctttctaataggtagtagaaacaatcttgtatcatatcaacccattttatgatttgcttttgctgctcttgtgtaacaaaatcagccccgtcaatccacctcttacccaaatgtataatgctatacacatcacttaatagggtttgtttgattgtcggcttcataaaatcatccgcaagaactttaagacattccattatctcgataaaattacactcatatagtttcccttgaaatggacgaagtgaaccaagaaatccattttcccatttctcattttctatatcattgtttctacaagaatggaaacttaataaagtatatgcttcttcctttgtcattgcgtttctgttcaattattgataatggttcagcagggaacggcttgccgttatcctgcgttgttatcaacctattctatattcaccatttatctgcaatttcaaattcgccgattgtttgggtacaaatgtcaatgtacggaatagtcttgactatcttgatgttttcaatatcttcacttcctcccaaagccaaaagtagagaatatccaaaacactcgtcataatctggagttccgagtttttcttgtattataggataattttctaaatcaaaccagcctttcaagaaactttcatttaccattaccttattaaaaatcgcacgaagattggcaggaagtattaaatatgttccgtatctgacattcagataaacgacgtaattattcagtctcggattctttacataggcaaagagatcgccgaaagccgtacacatgaatggtagaaatgattggtcatcctccttttcaaaacaggagtttatcacatcctgataatcggatggattgatgagcttaaacagcccattacaaaaacttcctaacccgacctcctgccataaagtattcagttcgggataagacaaatcagcatatttagcaataaaagtatcatctactgcttgcctcttgctattgaggcttttttctaaaaattcttcgtacatatttctacgttttatggttgataatggcttggcggggaacggcgttagtccgttatcccggcttgttatgaacttactttaccccttgtgccttttataatttgcatagcgagcatttagagtgtcccgccattcttggcttgggcaagagtttattaactgaatatacttattctcatcatcaacgcaaacagactctacaagttttaataaactccactgcaaatcataaaaagcattttcaggaaagatttgtaccaacaccatagcttcatcaaatgatatgggaagttgtatttgttctaataaggcatcataagtatttactaattcatcaatactctctgtatcattgatgctttcattaggcatacgacccaaatctttcaactgtaaaatttcatttctcatatcgtgtactctaattgttcataatttatttataaccgcaccttatggtgtcgttcctacacttctataactgcacctcacggattatccagtgtatcaaggggattagggatttttgctttatgggcacttgacacatgaagataaatggttgtggtcttgatgtcgttgtgtcccagcaattcctgtatcgtgtgcaggtctgttccctgttccagcaagtgtgtggcaaaggagtggcgcagcatgtgtacgtgtacacggtgtttgatgccagcacgatgtgcggcttctttcagcactttcaccaatgcacttgccgaatattgttctccgggtgtttcgccctcaaacaaccatttttgtgggcgatattcccggaagtagtgccgtagttcttccagcaacttgggcgaaaggagcgaataacggcatttcttccccttgcccatgatgcgaaccgacattgtttcactgttgatgtcctgcggggtcaggttaagcaattcgcttcttctaagtccggcagagtaaaccaacgaaatcatgcagtgatgcttgatgttggaaatttgtgcaaggatgcgcttaatttcattcttgctcaacacttcgggcaggctcttgtactctttggcacgggtgataccgccgtagtattgccgtttgccgcctttcacctgctcgtaatagaacttgatagcattgatgcgcatattctgttgcgacaccgagattttcttctcgttcacaagatagagtatgtacttgttgatgtccggcactttcaggcggtcgatgttccgtcccttgtgatattccatgaagtcgctgaaataggcacggtatgttttgacggtcgaggggctgtaacgcttctgttccagcagttcgaggtagcctttcggcagtgtgtattcccttttaggtttgggatgccgcacgtaaacccggctgtaatcaatataggcgtggggtgaatagcggtcgtagaaatccggcaggctgaaagcggctgacgctatgtatgcagagccgttgccagccatttccatgcctgtgtcttgggcgagcagttgggcgacagcctgactgctcgcatattctatccgtatgtagtctgcaccgtcccttgtttctttgtgcagcacgatgcttcctctttgtttctgaaccttatccatgtcgctgaattttgcttcatgctccaaagatagaacaaaaatgccacattttgaacatacgttcaaaaataatagaggttaaaaaaacaaaactgtatcaggctttaagcagcgaatagatatagcgaaagttttctgccagttcgtccacgttcaaaccgttcaggaatgcttgttcgtatgacagtcctaaaaacatttgccggaacatggtagccgttttcttcacgtccgtgtcacttctgatttccccgctttcttttgctttctgcacgactttcgcccacaggtcatggtcatggctaaatactctttcgattttctgcctgatgcccggatagtacgtacgcacttgtgacaggaaatgaaagtagtagaagctggagctacaatcatgcgggtcgccattgtcgccaatcagttcaacaatccttttcatggaagcggctacccctgccacgtattgcccgatgaactctgccaacgtatcggcaggagtggcaaacttgtttcccggttcgtgcatttttagcacgtatttgtctgccacagccatgaataaatccagcttatgcggaaaataataaacgatacccgtttttgtcaccccgcaggctttggcaagcgtgatgatgcttgctttctcgtagttcatcctgacaaataccccaaatgctttatctattacttcttcacggttagttattatcatacacgtttgtttttaatcggttacgaagatacggattttgttttaaccatttgtaccccagtgcttttttttagtgcaaggtgcaagtatatatttatatatatagcttgcaccttgcactaacccaaaaatatttattatcagatatttgcgagtttcaaaagaatgcagtatctttgaacccgaaagttaggcagacaaacacggtcaaagttggacaggcttaacgattaaaaatcgttactgtttcgttacctatttgaaattttgaaagcaaagtagctgacatataagcggttagagttataggttcaaaaccctgtctctccgctagaaagcagctttttgctgctttctgtttttatggagagttttttctctagttggtaattgtaaggagaggtgctcgagtggttgaagaggcacgcctggaaagcgtgtatacccctaaagggtatcacgagttcgaatctcgttctctccgcatcatttttttacattttaatattaatgaacggctgttttgacttatcaaggcagccgtttgttttatattgttttcgggaattcggttattccaattcttcaataatcttctttacatctaccggttgtaatcgaccatataccttctcgccgatcatcactaccggagccagtccgcaggcgcctacacaacgcagacagtctaatgagaactttccgtccggggtagtgtcaccgacttcgatacctaatacacgtttgaactcttccagcagtttttctgaaccacgtacataacaagctgtacccatgcaaacagagatgggatgttttcctttgggagtcatggtaaagaaagtatagaaagtgacgacaccatacactttcgatacgggaattccaagtttggaagcgataatccgttgcgtttcctcgggtagatacccttgcaaatgctgtgcctcatgcaaaatattgataagttcgcccggtttgtttccatgcttgtcgcagatcgttttgatttgctctgccatgtcacaggctagtttgatatctgacataatactcttcatttaaaagttaatcaatcgctttgttgaaataatgcgtatgcaggagagtttccgatttctcacctagcggtttgccgagataatcctcgtataatgtcttgatatacggattctcgtgcgatttgcgcaaaggtttgttggcgtcttcacggtaaagtgcgttggcgcgtgcatagagtatttccgagttgccgtgatgcaaaggctgcccgccgccaccgatacagcctccggggcaagccataatttcgattacatgatattcgttatgtccgttccgtatatcttccagtagatgacgagcgttgcctagtccgtgtgcgatgcctacttttaattcaaatccgtttaggttaatggtagcacgacggacgccatttagtccgcgtacctgttcgaaatttacatttttcaaaggttctccggtatagatttcatagacagaacggagggcggcttccattacaccacctgttgttccgaaaatgacaccggcacctgtcgattcacccatcgggttgtcgaatgggctgtccagtacgagagggaacccgatattggcacgtttaattagtcgtgccagttcacgggtagagatagaataatccacatcggggataccgttcactttgaattcatcacgtgcacattcgtactttttagccagacaaggcatgatagatacgacaaccagtttttctctgggtatgcccattttctccgcccaataggatttggcaatggaaccgaacatctgttgtggggagcgggcggtggacggaatgtccagcatgtccgggaaatgatgttcgaagaagttgacccatgccggacagcaggaagtcaggataggtaatcgtacggatttatctccgttgagatagcgcgtcagacggtttagtatttccgatccttcttccatgatggtgaggtcggcggcaaagtcagtatcgaatacatagtcgaatcccagttcacgcagtgcataaaccatttttccggttaccagtgtgccgggaggaaaaccgaattcttcgcctagggcagcacgtacggcaggggctgtttgcacaatcaccactttatccgggttagctaagtcgtcgagcaggcggttcgtataatcgcgttcggtcagtgcacctaccggacagacagctacgcattgtccgcaataggtacattcgctttccgtcatcatccggtcaaaggcaggggctatcgtcgtgttgaatccgcgacggatggcaccgagcgcaccgactgtctgaacatcgttacagacactttcacagcggcgacagaaaatacatttatccatgttgcgcacgatggaggcagtgatttcccgcttgcggggagagagctcgcctccattgaaaggcatttcgcggatattaaagcgtagcgctaatgtctgaagttcacaattgccacatttggggcaggtgagacagtcgttgggatgatccgacaggataagttcggctaccactttgcgtgcgttcatcacacgtagcgtactggtttttactaccattccttctgtgcaacgggtagcgcaggcaggagccagattgcgccgtcccatcacttcaaccacacaaatacggcaggaagccggattattttttatacaggttcctttcaggtcgatatgacacagcgtaggtatattgataccgattttgatagcggcttcaagaatagtgcttccctcgggcacagtgatgaaatgaccgtctatctggagagtaatttgtttttcttccatagtaaataagattttagcagacaagaatagcattgaatttgcagcgtgccatacacatgccgcatttgatacatttatcgggagcaatgacatgtggcttacgcaccagtccgctgatagcatccgccggacagtttttggcgcatagatgacaaccaatgcaacgttccggactgatggtatatgttaatagtgatttacattgcttggcgcgacaagtcttatcccgcacgtgctccatatattcatcgtagaagttatccaatgtggataaaacgggattcggagaggtttgtcccagtccgcagagggccgtatctttgatgacttgtcccaaagtggcaagtgtgtccaggtctttttctgtgccttttccttctgtaatcttgttcagtagttccaacagacgtttgtttccaatgcggcaaggtgtgcatttcccgcaggactcttccactgtaaaatccagataaaagcgggctacggataccatgcagtcgtcctcatccatgacaatcatccctcctgaacccatcatggaaccggccgagagaaggttgtcaaagtcaatgggagtgtccagatgtttttctgtcagacagccgcctgacggtcctcctgtttgtacagctttgaacttctttccgcctttgatgcctcctccgatttcgtagattacttcccgaagagtagttcccatcggcacttcgatcagtccgacattattaatctttccggcaagagcaaacactttggttcctttggaacgttctgtgccaatcgttgcaaaccagtcggctcctttggttagaataatgggaatattggcaagcgtttccacattatttacattggttggttttcccagataaccggattcggcagggaagggaggtttcagagtcggctctccccgttttccttccatcgaatgaataagggcagtttcttctccgcagacaaaagctccggctccgtatcgtatttctatgtcgaaactgaaatctgttcctaagatatgatctcctagtaatccgtattcgcgtgcctgattgatagctgttttcagtcggttgatagctaacggatattcggcacggatatatactaatcctttagtggaaccaatggaataaccgcagacacacatcgcttctacaatcgaatgtgggtcgccctccataatggaacggtccatgaatgcaccgggatctccttcgtcggcgttacaaaccacgtatttgacatctgactgttgcttgttggcaaattcccatttcagtcccgtcgggaaaccgccaccaccacgtccgcgaagtcccgaacgtttgataatatcaataacgtccgtcggctgtttgttaagcaggcaatcggccaatgcaaagtatccttcacgggcgatatactcttcaatattttcgggatcgataaaaccacagttacgcaatgcgatgcggagttgtttctggtagaaatccatgtgcttggagtcgctgacggtatgttccgttttgggatctacatacagcaaccgttcgattcttcgtcctccgatgatatgctcgttgatgatttcttccgcatcttcgggagtgacttgggtgtaaaaggtattatcggggataattttcacgataggacctttttcacagaagccgaaacagcctacggtgatgacttctactttatcggtgatttcgttctttttgatggcttttagaagattgtctgtaataccctggctggaagatgccttacagcctgtaccaccgcagatcagaatctgaagatgttgcgcaccggatgccagtccgtaacacttttcagtcaccttttcattactttcttcgcgcaatgaaagattgtgctctgctctcttcctgattgttgccaaatcatggatagataaaattttcataagtatcagaattgttagtcggttttttgcaaatataattctttgtttgaaataacagcgtagtctcgtacaaataaaattgttctttgacggaggatttaggtaaataaatctctatcttcgtatttaataggtatcaaacctaaaaaatataactgaagtatgagacgaattttacttggactatgttttctatcctttctgaacagcgcatccggacaagagattcctttgccggaaaagatgccgcagacacatccgcgggtactgactactccggcgggaaagcaggaaacatggaagctgattaaaaaagaagaatgggcgaaagatgttttcaataaattgaaggaacggacggaagtatatacgaacctgacggatgctcaaccggcgtggttgctgtctcgtttggcaatgtactggaagtctcatgccacggaagtatatgtgaaaggtgaaacgttcgaccatgcaggtggtgaaaaagctccttatcccactgtgcgctacacgggaacccgtggcacagctgctacccacggccgtcccaaattggcggatgtcgttccttatgatgatgaggacgggaatgtcactttctgcaataatgcacttcctgaccgtcctatggagagtgtacacccatccaaaacaggccggaatattgaaagcctgaactgcgaaatcctgggaattgcccgtgatgccgctttcctttattggatgacggatgaagagaaattcgctaaacttgccgcaggggtctttgatacatatatgacaggtatttattatagaaacgtgcccatcgacctgaatcacggccatcagcaaacattggtaggattgacttctttcgaagtcatccatgaagacgcactccatatcgctgtccctttatacgattttctatataattatctaaaggccaattacccggataaaatggaaatctacgccggagcttttaagaaatgggcggataatatcatagcgaacggtgtacctcataacaactggaatttgctacaggcacggtttattatgaatgtcggattggtattggaagacaataaagaatatgccgacggaaaaggacgtgaatattatatcgactatgtgatgaaccgttccagcatccgccaatggagtctgacgcgattggcagattatggtttcgatataaatacgggaatttgggcagaatgtccgggatatagcagtgtggtaatcaatgattatgccaatttcgtgaatcagtttgatacgaatctgcaatatgatttggtgaaagcaatgcctgtattgtcgaaagcggtagcaaccactccccaatatctgtttcccaaccgtatgatttgtggctttggagatacgcatccgggatatttgagtacgaacttctttatccgtatgatacagaatgcacaggcgaacgggaagaaagaacaggaaaactatttcacggctttattgaaatgcctgaacccggatttgggaaatgataaaacagaaaagaagaatgtgcgtgtatctgtcaattctttctttgaagataaaccgctgacgctaaatcccaaagtgcagccgggaaagatagaagattatgtttctcctttgttttatgctcccaatgtgtcatggctggtacagcgcaacggtatgcatccgcgcaacagtttgatgatttcgttgaatggcagtgaagggaatcacatgcacgctaacggcatttcgatggaactttacggaaaaggatacgtattgggtccggatgcaggtatcgggcttttcctgtatagcggactggattatgcggaatattattctcaattccccagtcataatacagtttgtgtggatggaatatcgagctatccggtgatgaaaagtaaccattcttttgatttgctttcctgtttcccggcatcagcggaaccgggcaaagcatttacgtccgttacttacagtaacctttatttccgtgaaccggaaagcagggcggatcagacccgtatgatgagtattgtcactaccggggcggagacggggtattatgtcgatgtattccgcagccggaaagagaaaggaggcgataagatgcacgattacttctatcacaaccttgggcagactttgacattgacggcagcagatggcagcgacctgaatctccagcctacggaagaactcgcctttgcaggcgcacatctttacgcttattcctatttatatgataagaaagtggctgcgaccaataaggatgtcaaagcaactttcaccatagatatgaaagataaggacggcgatgatatatacatgaatctttggatgaaaggcgaaccggatcgtgaaatctttacggctttggcgccaatgaccgaagggctaagccgtacaccgaatatgccctataatataaaggagcagccgacgctgacatttgttgcccgtcagcatggagaagcttggaatcgtccttttgtctcgatatatgaaccgagtacgaaaaaggaaccgtctgctattcagtccgtctcttactttgatgcagaaggagcaggtttggaagactttgccggtatctgtgtgaaaagcaaaaacggacgtatagatcatatcttctctctatctgatgccgcacaaaccgctacttatcaaggaatgaaagtgaaagcggattatgctgttatcagcaatgaatatgcaggaaaccggacgttgtttttagggaatggaacccaattggttgcacccggggtaatgattcagaccgacaatgccgctaatgtattgctcgaaaagaaagaagggaaatggtatattatttcttctgctccctgtacggttgttatcggcgataagaagataaaacccgatgctgcgtcggagcctatgttgttgcgtatctgatgtttcattggtaataaagaaaaattgtatatcttatccgtagtatggtatattatggcctaagatggaaattgttgcaataaaaaacaaaaaaagcgtgtttaaacgtttttaatactatattttttctaattttgtggctttctgtccaagtagtatataaaatggacagtaagccctttttttgtgggtaaatatttagtgggaaatatttagtgggaaatatttagtgggaaataaatgatggtatatgtgatgagaaatggtcgcagggtaatagctgcgttatcatttctgttattatgttgtggtgtacatgtgcacgcacaacgggtggctgtaaagacaaatgcattgggttggctgaccgccagtccgaatgtagaagcagaatttgtattgggtagtcatgtctccttaaacatggggattgctgcgaacccaatcagtacagacaactttaaaacgactttcacgcattttcagcctgaagttcgttactggctaaatcgtccgatggtgagtcattttcttggaatcaccgctttcgtgaataattttgatatgatggtaaaagatgtgcatcacaaaggcgatgcatacgccgccggtttgacctatggatacgcatgggtgctgggcgatcattggaacatcgaagcaactgccggagtgggtgtgttgcgctaccgtcagtttaagtatgataagggtactccgaaaccgggtgcggtcaacgatagtaagaccaccattgcacctgtcaaactgggggtatcctttgtttatattattcgataacgaacattagctagtcagaaaagagaatgaaaatcaatttgaaacgtgatagattaacaggtatacttctcgtggcgatgatgttcgtcggtatgaatgtatccgcccaacggatccgcgtgcaggggcatatcacaaacccgcagggaaaaagtgttccgaatgtaaatgtgttgaatccggtcaatgacgaacgtatagaaatgtccgacgaggatggtcgttacagtgtcttggttgagaaaaacggctcgttgaagtttacatgtgtcggttatgaagacaaaacagtgaaggtggcaggaaagcagattctgaatgtagtattgaaagatgccgtcatcgaactggacgaagtaacgattacttccaaagtgaaggacaaagtgattccggaacctacggacatcgaaatcaaaggcaattatttccatctgaaaacccgtgtcccggtgcctaaggagatgtttaactcacatcgccgcttggtattgcagccttccatttatgatgtgacactgaaaaagcgtctgttgatgcgtcctgttgtatttgacggggatacttataatacaacgcaaaatcgaatgtacgattatgatatggataaagatcctttgcacgattatatccgtgtgaaaactacttcttcgcgcaagggggatattattgcttaccatgattctatctatatagaatatctgcaacatgactaccgtgcagatgtgcatctggcgatggaaaattaccggaatatcatttatcgtgactctttctccattgcacgcggaacggtcaacccgcttcgtttcttggagtataaattctccgctttcagcctgacggacgagaaatatcttccgaaacccgtgatgcaattgcgggatacgaaaggtgaggtaaacttaaccttcctggtaggtaaagccgacctggatgataagaatccacagaatcaggtggaactgaaccggttgaaccaggaattgcgtggtattgagacgaacccggatgcctctttgaagagttttcatattacgggggtggcttcgccggacggttcttacgcgacgaatcttcgtctggcaaaattgcgtacggataaagccctggaacgtatactggcacaactggacccggaaacacgtaaactgttggaggtgaaatcggatgcatcggttgcctcctggaaggaggtagctgaattgctgaaaaaaaactccaagccggaactggctaaagaagtagaggacttaatcaaacaatatgcagctactccttaccggttgaatggggtcttgaaatcgaaacctttctacaaggaacttgcggctacttatctgcctaaattgagaaaggtgcaatatacgtatggttattcaatcttccgttctttgacggacgacgagattagagaactttacagaaagaatccgaagcaactgacccgtttcgaatattaccgtatgattacgacagcaaaaactcccgacgaaagggaaaagtattgcagggaagctcttgaactttatgataactttacgtatgcagccaatgaactggcagtggcaacgatacagaaagatactccggattcacgtattctcgaaccgtttgtcagtaaatcggcaccggtggagttattgtccaatcaggctattgccttgttgcacgaagggaaatatacaaaagcagattcagtcttgaccttggttcccgaagaagcggtttctgaagatttgcaggccattgttcaggcattggccggttattataatgatgctttcgaaaaggtggcggctaccagccctttcaatgaggtggtgatgctgctggcaatgaagaagaatcaggaagcatgggataagatttctaccatggatgtagagaccgcccgcgaatattatataaaagcgattgccgccaaccgcctggagaaaataggtgatgcgattatgagcattgagaaggcccttgaacttgatccttccttattggaagtagcgaaggtggatggtgatattattgacttgctgccggaagagcagaaaattaaataatgatatatacaacaagagtaaacgatgaatatcttcagaatcaacaataaatatgtagcagtggcaatcttcctgatgcttgctgttaccttacaggcacaggattatggtgcattgcaatatatgttacagaaacggcctgcaaatgaaaagttcgagagcaataaattcaatgaacatctctttttctctgccggaatagggccatacagcttgttaacaagtggagatagtcaggatggaatgggaatgaccgcccatctctttatgggaaagtggattactccggttcatggacttcggataggggtgaatttaggttatctgccgtcgagtatctacgattctaaaataaaaatgggtggcggcagcctggactatctgttgaatatgtcctccctggcatacggatacaatgcaaaccgttgttttgagttagtagggattgcaggtatagaagccggttattctaaggtgggcgacaatagcgatcgttccgaaaagtatccggatttgaaaggcggcggtcagctttattacggcgctcatctcggtttacagggaaatgtacgtctttcttctacattggatttgtttgtagaaccgcggatcggatggtataatgacggttttgcgtatacggaaagttggagaaactataaaatggctggttcggttctggtaggtctgacctatatgcctgctgctccgatgggaactaagattcatttcgatgatttcgataaaagttccttcctgaatcatatgtttatctctttatccggtggtatcagtacactgaaagttccgggaatcaagaatacgattaaaggattagggccccagttctctgccggaatcggtaaatggttcagtccttcttccggtctgcgtttgtccggaacagttggactttcggatactccttcgggcagcgcaagcggctactttaaacatgtggatctgcatgcggactatctgttgaatatcaataatgttctttggggatatgatgaagacagaatatttagtctgatcggtattgccggagttaacctggcaggtacgaaaggagtggataaaaccgccaagtatgctccgggaataggagtcggtgtgcaaggaagtttccgtatcaaccgttctgtggatttatttatagaacctcgcctcaatgtgtataataagagatatgcaggaggtcgcggagtaggtggcaatacggatcagctcggagagttgaattttggtttgacttatcatacgattgaccgtacggcacgtccgaagaacggattctcaagcaatcacatcgcagacaatctgtttatgacttcgggaatcggtgtgcaaatgttcctgaataagacgaatcttgaaaaccttggttctttaggtccgcaggcttctgtctctatcggtaagtggttgagcccttattccggtttgcgcctggtgggtacgggtggattctttacgaactatgtagttccgggaagtgttaaagcgggcaaacttagacatgccagcgtcagtggcggtcttgattacttgtggaacataacgtctaccatgagtggatataaccccgatcgtatctttgatttaataggttcagtaggtgtcaaccttgcttatacttccaaatcagaccataagttccaaccgggtattaatgcaggcatacagggattatggcatgtgaatgattttcttggtttgtacattgaaccgcagattcgcttgtatggagataaattcattgaaggtaatctggggtttatgcagaaagacgtaatggtaggagtcaatgcaggtttccactatcgctttgttccttattcaaaagcagccaatcgtagcgtgtttagtcaggatgacaagcgttacttcatctccggtgcacttggattgggtagcttgctcgtagccaacaaagatttggtgaagaatgcaggtgtagaagcaaaaggaagtataggtaaatggtacactccgttatctgcatggcgggtaaatggaacaattatgtacaaggccaaaacgtcgtcgaagatgaatcttcattatgccggtttgggtatggattatatgatgagtctggccacattggcaaaaggatacagccccgatcatgtgatagatgttgttccttttgtgggagttacggccggactggtacgccgttacggtaagttccgagcagtgccgggaatggatgccggtgtgcaggtaaagctgaaagtggcttcttctttgtatctgtatgccgaacctaaagtcggtatccgtaccgatacatacgatggctccgaacaaggaagacctgaccgcgtagcttccatggtaggtggattattgtacagattcaagatgcctactttccaataagaagaaaaataagaaatcgaataaaaagggttgcgcaataccggattagtgattgtgcaaccctttttgtattccatttccaagaaattacggttacataaacgttacattaatattacttccatttctacctgataatgaataaaatgaatctttagaattcattttctcccttgctattctcctctacttttgctccagaaattaaaacgaaaacgtatgaaaacgattactgaagcaatatcgaaactaagttcaaacagaagattagccgatttcctctttattctatgggcaggtggagcagcccttctttcttactcactggtttatacattgcgcaaacctttcacagctgctacttttgacgggatagaagcattcggctttgattataaagtactggttactatcattcagatagcaggttatctgatagccaagtttataggtatcaagttgatttccgaattgaagagagagaatcgcctgaagtttatactcgtttccattgccgtagcggaattgtcattggttgcgttcggagcacttcccactccttataatatgtttgccatgttcttcaatggattgtcattgggctgtatgtggggagttattttcagttttatcgaaggtcgccgcactacggatattttggccagtcttttaggaatcagtattgttatcagttcgggaacggcaaaatccatcggattgttcgttatgaatacattgaacgtcagcgaattttggatgccggcacttatcggtgcttttgcacttcctttattggctcttttgggatatagcttaacccgtttgccacaacctacggcacaagatatagaacaaaagagtagtcgtgtaactctgaatggcaagcaacggaaagaactgttcatcgactttatgccatttcttgtattattgtttgtagctaacctaatgttggtagtgcttagagatattaaggaagatttcctggtgaagattattgatatgaacggacagtcctcatggatgtttgcgcaggtagatacagtcgttacattaataattctggcgttattcggagcgatggtctttgtgaaaagtaacataaaagttttggttgccctgctgggattggtcgtacttgggacagccaccatgagttttatatctttcaattatgattctctgcaattggatgcaatcacctggctgtttgtccaaagtctctgtctgtatattgcctacctctgttttcaaagcatttttttcgaccgcttcatcgcttgtttcaagataaaaggaaatgtcggtttcttcattgtgaccattgattttatcggatatacgggaactgtacttgtcttgatgttcaaagaatttgcccatgcagacataaactggttggaattttataatatattatccggttacgtaggactgatctgtacggttgctttcacctgctccatgatttacctgatacagcgctataaaaaagagaaacaactgaagaaagcgaaagaagccgaaatgagcaacgggataaaatttacgggagaaggtatggagccaactactttttcacaaatttgataaaaggtggacgatgaaaataataggactatatttgaaattctccttccttctatctctaatactaacgacttcccggataacggcacagaatctgcccgatggcatacaatataaaatcaccgggcgtctattaatggatggaggagtgtatctgaagaatccgaataactttggcaacggcacggaatttaatgaccttcgcatcggtgtaaaagctacctatcagaactggggaatgaaactggaaatgggatatgccggaaacaaagtagccatcaaagatgcttttgccacctattcctataagaatagttccattcagataggacaattctatgagccattcagtctcgatatgatttgtagtacatttgatcttcgcttcaaccaatctccgggagctgtgctggcattgacaaatagccgacgtatgggagtagcctattcctatcgtacccaatattactatctgtgtggcggattctttaccgataatgatttgagcaacctgaaaaacgcatcgcaaggatatgccattgacggacgtttggtttaccgtccactttatgagcaagcgaaactgatacatataggattagcagctatccatcgtacaccggacggcacgcttcccgaagatgagaacaggaatacgtttacttataaatctccgggcgtgagcacgattgataatcgtacattaatacaagcagatgtagatcatgcagcatcccaatttaaaataggaaccgaactgctaatttactatcataaattctttcttcagggtgaatacatccgcgcccatgtaaaacgggaaaagggttttgagaactatacggcacaaggagcttatctgcaatgttcctggctattgttgggacagaattatctgtatgacgaagaagtagcctgtcccggaagaccggaaggaaaagcactcgaactatgtgcccgtttcaattatctctctctgaatgatgccggaataaaaggcggaacacagaaagacctctccttcggattgaattactatatcaataaacacattgctgtcaaattgaattatagctacttcatccccggctcgcatatcaaagagatcgaaagcacaaactttagtgtagtacagggacgttttcaattcatattctagtacttggcagttccgttcgaataaagctataataaagaataggaaggtgtattttatactagttttactaaatgtttcaaagacatgtcgagagcactaccgactcaatatgcagaaccgtatgtaaaaagtaaaaaataagaagactgaaaaaactggaatgttctaggtaaatctcctttattgttcgtaatagacaataaaggagattttttgcattggttattttttctatagtttctgttaccagtttgccaacctgggtggaataggaagtatagttttagaaagaacttcaataaacagaataattaaaatataacatagtttagtgatatgaatatagtaggagttttatcaggtaaaagaaaatgtttgttagcaatagctattgcattttcgacattcgggaatgcccaattagtaacctatccggaaggattgaacactggtatgccacataatgatgattatacagtcaaagtacgtgaagcaggcggtgaatggaaagatgtattcgaatatgaagtccaagtagatatggatcgggtacaatctgcttcaatggtacagtttgatataggcagtcccgtagaagtgatggtgaaaaagaacaatggcaccattcaggatgtgaaaatccgtccgttagcaataggtatacaacatacggtaaaccacaatgctatcttttttacactcactagacctcaatgcctgtcgattgagtttaacggtgatcgtttgcataatcttcatttgtttgctaatcctttagaaacagaaacttatactgaaagcagtgacaaagtaatgtatttcggaccgggtgtccatcgtccgaaagatttgccgaatacacagatacagattccttccaatactactgtttatttagctcccggagctgttgtaaaagctaaattattgattgacaaagctgaaaatgtacgcattgtcgggcgtggtattctcgaccatccgatccgtggaatagaagttactcattctaaaaatatatggattgacggtattacagttataaatccagatcactatacagtatttggtggtgagtctacagggttgaccatcaataatttaaagtcttttagttgtaaaggatggagtgatggcatagatctgatgtgttgcagtgacgtattaatagacaatgtttttatgcggaacagtgatgattgtattgccatctatgcccatcgctggaactattacggaggaagtcgtaacgtgactttacagaattcaatcctttgggcggatattgctcatccgatcaatattggagggcacggtaacccggacgataaggttggagagattcttgagaatataactgtccgtaatgtcgatattctggaacatgatgaagatgatcttctttatcagggctgtatggcagtggattgcggtgataaaaacttggtacgcaaagtattatttgaggatatccgtgtagagaatattcaggagggaagattgtttcatattaatgttcgtttcaattcaaagtatgataagcaacccggccggggaattgaagatattatttttcggaatatcatttataatggagtaggggagaatccatctctattgaaagggtttgataaagaacgttccgtcaagaatatcatcttcgataatgtgattatcaacggtatgaagatgaaaaatatagatgattttatcacgaatgaatacataaagaatatcacagtcaaatagcataatctggtatatgaagtatgaatggaaaaaactctttgtattaggtgcaaacttcttttcttctaatatcaaactttctttaggttaaacataaactataaatgcaagtttcatttatataattagaacttgcaattatataaatgaaactttcgtttttataatcaaagcttgcaattatagatttctattagataagagtaactttagtattagaaggaaagaactttgcaataggaagataataacttatctattaatagatgagagcaaagctgcactggaatcagaattaaggagtctggaagagaaccatgagtataaatacaagagttttattcctgggtttatgctaatcaaagtaaatgtttcattcactttgaactcctttctattactaaatactatctttgcttatcacttgtataaaaaacgaatcgcactatgattaacaaaattatatggattattgggattgtatggattgggaatattcaagatggagtgcaagcgcaacgacgtaactttatccatcccggaatcacctatacccaaggtgatttagaccggatgaaagctatggtcaaggcgaaacacgagccttattattctacttttctgaaattaaaggaatctccctattcttcactcaatacgcaagttatcaatcggggaaaacaaatcagagaaggacgttttaatgctactatcggagtagatggcaggcgggcacatgacttagcattgctttggcatctgacgggcgatgaggcttatgcccgtaaagcggtcgaatatctgaatgctaattcttattataccaatacaagtagtcgtggaacaggaccattagataacggaaagatttaccttttaattgatgccgccgaattaatgcgtgattattccggttggaaagtagaagaccagcaacgttttaaaaatatgttggtctatcctggatatagcaatacggaagatttctcttccaaatatgcaaattactgggatgattcaaagaacggagttacattctattggaatatttttaatttcgatgccgcaaggtttggtaatcaaggacttttcgctgctcgtggaatgatggcaatggggatttacttagataacgaagtaatgtatgaccgtgcttaccgttatttattgggaatgaagcatcgaccggatgatttaccttatccttcaggaccgacggtcactagcaaagaaccgattaagaaatcaccaaccatgcttgattataaattggaaggaagagaaaacaagatttcagattatggatacgatgaacagctacagtattatatctatccaaacggtcaatgtcaggagtcgagtcgcgaccagggacatgtattggcaggtatccacaattatgtagctatcgcagaaatggcatggaatcagggagattctttgtataattgtctcaataaccgtttgcttcttggtttggaatggaactatcgttataacctctctaaagtccagacttatgaagagcaaaaagagccttgggaaccgacaagttatagtaagaattcaaatgaagttacctttgagaacggaaaatttctccagataaaaagccgtagtggacgttgggaatccgtagccgtatctcctcacggacgtggagacgtagcaggtagtggcggaactcgtgaaatggcattggcgcattatgcagtacgtgctggattgccggagaacaactatacttggttgaaacgttaccgtgattatatgatagaacatcacggttgcgaaaactgggggatagcacccaactggttttatgaatggactggctggggaacattgaccaagcgattgactccctggatggcaggtgatcccgtttctttctctacgggaaagcgtgtatcaggaattcatttgctgccttgtgaaatatcggctgccgattacgattattattgtcttgcggaagatcccgaagggcatacctatcacaatgtaggaaagaaacgtggcaacgaatacagacctgacggagcagtagagctacgaaaagaagaagataattacgtcgttacccaaatagaagatggagaatggatgaattatactgtaagtattcctaccgatggagattataccgtttatcttgtttatcaatcaaaaggaaattctttattgtccgtagcttctgattcggaagtaaagacagaacccatgcaattacccagctctgtacaatggacggaaagagaaataggaaaactcactcttcccgcaggagcttgtgtacttcgtttacagatagagcaagccggagataaactcgaaattcagaaaataatagtaaagcaggataaggggatttgatttttcgttcgtacttaatatagtactacaaaaaaagatggccatgaaaattcgaatatgtttgttaatcatactaatgggattattgtatccgggttatattagctcgcaagaatccccttatgtattccgccagattggagttgtcgaaggattaccggataactatgtaaaaagcgttttccccattcccgacggacgtatcggtgtgcgaagtactgtgttattaagcctgtatgatggtgcgaactattcaaatttccctttcaatattcatggcgaatattcgatagcatataaccatattattcccgaacaatatattgatgccgacaaacgtttgtggatgaaagaacgcaagagcctgcgtgtcttcgatttgactaccgaacagtacatctataacgtagattctttatttcaacaattcggcttaaaggataaagtggcggacctgattattgattcagagaaacattgttggtttctgacgccgggttcctctgtctatatgtacgatgcagagacaaagtcaatcgaacaggtttgtaggaatgatgagtttatggaatactatggaggattactcggagtagaaagtcatggaaaatacagttggatggttcatcagaaaggggctatccgttgctacgatttagaaaagaaacgtttcgtgcatcaacttgatttcctgaaagaccaactgaaaccggatgaccgtgtggttttgaagatactcgataatggtgacttttggttgatgtgggatcgtggagtaggctattatgatgtctataataaaaaatggaaccaaatttcaggtatccaactcggacactattcatggtttacttctatggacgtggataaaggcggaaatgcatgggtaggaaccgttatcgatggattctatgtcattgatatgcacaatttctctgtaacccggacactggatattcctttattatcaggtaatacagtacgaaacggtattcaaagcatctattgcgaccgggaaaataattccgtttggataggactttataatcagggaatgtgttattatcatcccagcatgaataaaatagtgctgtacaataagaagatgataaatggcgactggaaaggagaggaaatccgctgtatgctcgaaacatctaaaggagaaattctgatgggtactacgcagggtgtctatcgctatgaaccggagactaaaagcatgaacagattctatcatgaattcagtcagaagaattgccgtgtactttatgaggacagcaagaagcgtgtttgggtcggaacataccacgatgggctctactgcatagatcatggaaaggtacaatcttacgattatcccgatacggattatcagaatgaattggatttcagtaatatccgtgtcatggtcgaagattcttccggtcgattgtgggtaagtatatatggtggtgtaggattattcaatcctgaaaacgggcaaataaacttattgtccgaacagtttcccgaactcaaaaaatataaagtagcgaatgcattggccatagataatcaatcccggttggtcgtaggcagtgataacggactctacatttacgatcctgcaacgaataaaatatggataccggaggaagacgggcaggctaattctattttcaatcagggaagtatcaagtataatcagatcctcaaagaccatgagggaactttatggtttgctacacaatatggcttgagcgttttgacttacaatgggcaaagctacacattagggaaagaagaaggtctgtctaaagctatcctgaacgtagtggaagataagaaccatgatatatggatttcgacagtcacttctatttataagataaaagtagacagaagagcagataaatacagttttcatgtaatcagctgtctgtcggaagatgaaatccgtcaggatgatttatatagtttcccttcgttaatgaccagggacaatcagcttttcctggggctgatgaacggctttatcgctttctcaccagaaaacatgatagataatcagtgcctcaatcgtcctctgtttacttcattccgcttgtttaatgttccggttgtttcgggcgaagcatataacggacgtgtcttatttgataaagcattaagttattcggacgaagtacaattaaaatatgatgagaactatatcacacttgagttttctggtctgaacttccctaatccttctcaaacctctttccgttaccaactggaaggatttgacaaagaatggacggaaaccctttttgagaatggacaaggacgtgtggtctataataatctcccttcgggcgaatacatcttccgtgtgtccgctgccggaaacgaccggatatggggaccggagtctgcattcaaaattgtcattcatcccccgttctgggatacactggccgctcgtattttctatgtaattttagttattctcttaatcttcgggctgatctacgtaataaaccgccgcaaccggcagaagatgattcgtatgcaagaagaggaagcgttgaagcagaaagaagaactggatcagatgaaattccgcttcttcacaaatataagccatgaactccgcactccgctgactttgattatcacgccattagacatggtgatacgtcgattgacagacgatgcgatgaaaaaacaactgaataccatctataagaatgctcaaaacctattgtcattggtgaatcagctactcgatttccgcaaactggaaatgaaaggagagaggttgcatctgatgaacggcgatatggaggaatttattgtttcggcctataacaacttcatgccaatggcagtagagaagcaccttaactttgtgaaccaatcggaacatagagcgctttatatgttcttcgaccgggataaggtacataagattgtgaataatctcttgtccaacgccttcaaatatacaccgcagggaggcacagtgaacttacagctcgcgacagaagagatagaagaaagaaactacgtgagaatatccgtatctgatactggaatcggaatatccgaatcagaccttccttatatctttgaccgtttctatcaggtaggaaatgaaggggacgaaaaaataggcagtggcatcggacttcatttggtaagggaatatgtaaatatacatggtggccgtattaaagtggacagtcagatagatcgtggatcagtattcactgtttggttgccgatggacctgaaaccggaaccggacgaactgccggaagaaatcatcggaacggaagcatcagatgttaaagagaaagaaaccactacatctacagttgatgataacctgaagaaactgttgttagtggaggacaatcaggagttccgtactttcctgaaagaacagttggaagatttctatcagatcattgaagcggcagacggtgaggaaggagagcgaaaagcaatagaggaaaatccaaacctgattatcagcgacattatgatgccgaaagttgacggtatcgaactttgccgtcggatcaagacgaacgtgcagacttcccatatacctgtgatattgttgacggcccgcactgccgatgatatcaagattaacagctatgaagtaggagcagactcttatatgtcgaaacctttcaactttgatatgctgatggtacgcattgaaaagctgatagagcagcaggaaaagagaaaacaagaattccgtaagaacatagaaataaatccgagtgctatcaccattacttcagtagacgaacagctcatacagaagtgtctggaatacatagaaaagaacatggacaatccggaatatggcgtagaagaattgagtggcgatttgggtatggtgcgtatgagcctttaccgcaagctgcaatccatcaccggacatacaccgacagactttattcgcagcatccgtttgaaacgggcggcacaattattacaaggaagtcagttgccgattgttgaaatagcgaaccgggtaggattcagttcacccagttatttctcgaagtgttttaaagaaatgttcggtatgcttcccaagcaatatgccgaggaatcgggaagaaaagaatgacattgtgcttgtgtttgtagtttaattattacatttgcgctcaataagtgagataattttaagttcttgttcacattggggcagaagaagttttattttataatatatgttgatatgaaagtattagttttaatttcattggtaggaggtttgatgttatcctcttgcggaggtagcagttcaaaaaataatgcaaatgttaaggaggtaaatcctgcagataccatctatttgggagacttacgtgaaaaatttgcaaatgatagtgttttctttaaaatagtggcaccggatttgatgttgatggattatcagtatctttgggcagtaacagaatcggaagcagtagagaaaggactgacaaaagaatactataaacgtgtgaagaaagaaatcaccgatacgaatgaagcgatcaaaagaggtgtgatgaaaggtgcgaacgtaaaacgtataccggatttccaggcatcacaggaaaataaataatgaatccttccggatgaaagctttcatccatgcaaatataagaacaggggagtcgtcaaatgtaacgacatccccttttttattggtgtgacggttagatttatcccgatgaaatgggaagtttttgcaaaaatacacgcttgttacgatagttttgttatctgttacttttgtggtatttgaatttgaaacttgttcctacttttgtatcatcgttaaacggataaatttaatgccatgaataaacagcaagctacatttgacgacttcttctctgaatgctatcttaaatataaggagtatatcaagaactatatcgctatccgcatttgccatccgcatgaagcggaagatttggcacaggatgtctttgtccgcttatgggaacacagggtattcgtgaacaaagatacagtctggtctttgctttttaccatcgctcgcaatatagtaaccgataaaatccgtcgttattataaacaggaagatttcgtcgcctacatatataataggatggaagacaccagtcggaataccacagaagataccattcattttcgtgaactaaagaagatgcacgaccaggtaatggaaactcttcctgtcaaacgccgtcagatttatgaacttagtttcaatcatgaactctcttgtcctgccattgcaggaaagctgtccttatctccccgtacagtagaatgtcaattattactggctcgtaaaacggttcgtacttatttgaaaaatgaattctccaaagtcggttaaataccagattcggaaaaacacatattaactttaacaatttaatagtattatggaaattaaatccaaattcttatgttcaaaaggagtcgcattggctttcgccatgctactgggtggttcgcccggtgtattgctctatgcaaatgattctgtagaagagagtttgatggtagtccagacgggccgcaccatcaaaggacttgtgacagatgcgaatggtgaaccactgattggttgtaatgtagtggttgtaggaagcaatgcaggggtaattactgatattgacggtcggtttacattaaatgtacctgcggatgcaaaacagataaaagttagttatattggttatgtagatcaggttatcaatcttcatgaccgttctgattttaaagttgtactaaaggaagataataatgcgctggacgaggttgttgtagtgggttatggcacgcagaaaaaagcgacgttgacaggggcggtagaacaaattggtagccaggtattggaaagtcgtgccattaccaatgtcggtgctgctctgcaaggagccactccgggtttggtagtcactcgttcttcctcacgtccgggtaatgaaggtttgaatttccagattcgtggtttgacatctgtcaatggcggtagtccgttgattattgtggatggagtacccgtattgaattcagagtcattccaaaatctaaactcggatgatattgagaatattagtgtattgaaagacggttcagcttccatttatggggcgaaagcagctaatggcgttatcttggtaactaccaaaaaaggtaaaggcaagacaacggttgattatggcttcaatatgcgtttcactaccaatggtattatggctttctctcccagtatgcaggaatatgcttccatgtggctggaagccaataaagaaatgccggaacatgactggtggggctggggagaagaaaacctgaagaagatggctcaaggcattgaaggtatttatgagtcgactgtagccgattggggtacgatgttcgttggtaatgccaatcgcctggatgaattgtttgcccgccgttattcttaccagcataacttgagtgtagcaggttctacggataaatccgattaccgcatctcattagcttatgctgataaccaggctaatctggctacagcctatgacggacagaaacagttgaatttgcgcttgaactacggaatcaaattgactgattggttcaaactggagacttcagccagtatgattaaaacaaataccgaaacacccacgcatggtatcgaccgtacactttacggaaacgatgctccgtttttcccggcaaaaaatccctatggacaatggtacgctaacttcggtaatgtaggtgatcgcaatgcggcagcagctacaacggatggtggacgtgacgagagagagaagttgactactcgtgtcgattttaaagcattggtggatatttggaaaggaatcactttcgagggtactgcttcatttcaaaatgaggaatatcgcagagaacgctattcgcttccggtacagtgttacaattggttcggcgagcagacggcgaagttagtatatgaaacaacacaaacccttagtactccgcaagatgtgctgaattttaaagattcccatcagccgggatatttggtacaggcaaataatgcccggtatcagtactattcagggttattgaaatataagcgtacatttgccgaaatacataatatagatgctatgttcggcatcaatgccgagaaatgggtgactaagaaagttgttaccgcccgtgagaagtttgaggatgccggaatttacgatttgaatttggctacgggtacacagggtaacggtggaggaaagactcataatggtacctattcatatattgcccgtttgaattataactatgcggaaaaatatatggttgaattgatggggcgtcgtgacggaaattccaagtttgctcccggttatcgtttcaaaagctttggttctatctctttgggatgggcattctcggaagaacaatttgtagaatttttaaaacctgttctttcttttggtaagttgcgtttaagttacggtagttcgggtaatgatgtcgggctgggtgattacgattatgtgtctactgtctctcttggaacagccggttttggaactatacctgccaatcaggtatcttcaggttttggcggtttaatttcttatgaccgtacttgggagaaagtttcacagaaaaactttggtatcgatcttaactttttcgataatcgtttgaaagctacattcgattattttataaaagataataccggtatgttggtaaatgtcacatatccgggtgtattaggaggtaaagctcctaaaacgaatagtggtcatttgaatgtaaaaggttgggaattcactattggatggcgcgatcagattaaagacttttcttactatgccaactttaatattggtgatacaaagagtctgttgaaagagatggaaggagcagattcttatggggctggttggaatgcagccgtgaatgggtatccgttgaattcgtacttcctttatcgcacagatggttactttaaagatcaggcagaagtagaccgctattatgcactctatggagagggtaaagaagatttgactggtgtaggagcaggaagtgcaagccggttgcgtccgggtgataccaaacgtttggatttgaatggtgattataagatttccggtgcagggaatgagaatagcgatttgcaatatctcggtgactccaatccacattttgttttcggtttcacactgggaggatcatggaaaggtattgatgtgaacgcaatgttccaaggtgtcggcaagcagtatgttatccgtaatgactggatggcttatccttttcaaacacgtactgccaatcagaacccgacatatttgggaaagacatggacagagagcaatccgaatgctgaattccctcgcttgactaccaatgcgaatctcgcacgctggaattatcagaataacgactttatgatgcagaataaccgctatatccgtttgaaaacattaatagtcggctacacattgccgcagatatggactcgcaaggtgaaactggaaaaagtacgtgtttacttctctggtaatgatttatgggaagctaccagtattcgagacggtttcgacccggaaatgggagcagcctccaacaacagtggatacccgtttgcacgtacttggtcgttcggtctgaacatcactttatagtagctatggaaaattaaatacagaatagaagatatgaaaaagataacgaactatatattaatttgcacctgcgcattgggattttcttcatgcgtgaatacgttccttgacttggaaccactggatgccaagacagatgtgatttatttcaaaactccggagcatttccgtgaatatgctaacgggctttacgggcaattattgggatggcagtcttcctatggaagtatattcgatcacatggatgcggcatccgatctttctacttgtttcagatattcgtatggtgtggggaccggtgtgatgggagttcctaatgacgatagccgttggggtaattgctatggtaatattcgtgccactaatcacatgtttgaaagagcagtttcttcctatacaggtaatttagcggatattaaaaaagaattagccgaaggtcattttttccgtgcctataactatttttacttattgaagttttttggtggagtgcctgtcgttacgaaagttctcgacgtgacttcaccggagttatatggaaaacgtaacagccgttatgaggttgtcaacttgattctttccgatttggatgaggctattgcagggttgccgttggaacagaatataacctctgccgacaaaggtaaaatcagcaaacaggctgcacaggcatttaaggctcgcgtgttactttatgaagctacctggcgtaagtacaatggcacttctactgattttgaaggttctgccggtccggcttccgatcaggtaaatacttttctggaagaatccgttcaattatccgaaacagtgatgggagatgctgcttattccctttggaattataacaatgttgcagctatgagaaatatgagcaatcgttacctgtttaatattgaagaagaagccagtaatcctgccggtgccggaagagcgacgaacaaggaatttatcatcgcttctgtatatagtcaggaaacgcgtaaaggacaggttgatttgaatcaggtgatttatacggatatgcgtcccagccggaaattgattgatatgtttttatgcactgacgggcttccggtcagtatgtctgataagttccagggatataagaatccgggggacgaatttcagaatcgggatttccgtttgacttcttatgtaggttcatatgctacgagcctgacagttgagaactgtgggtatggtgtttccaagtttgctattactgatattcaacgccaaagtaaagatgaatcggccaattatccggtacttcggttggcagaagtatacttgaattatgctgaagctgtgatggaacgctatggtgaaatatcagatgaccagttgaataagtcgataaataaaatccgtgcccgtgcgggaattgccaacctaacaaatgcattggcaaagcgaattcaggaaggagtgccggcaaatgcgagtaagacagtcaatcaggtaatgctggatgagatccgccgtgaacgtgccttggaactctatatggaaggtttccgttgtgacgacctgaaacgttggggtattgcggagaagaatctgaatgagtctcgttgcggtgcggtagtaggtaatgccagctatccgacggcatttatagacgaaaacgggaatgctaccagtgctttcaatccggctatctttacgaaggggacggaagaagtggaaacaggtaaaggcaaattaccttgtgtagtgcttctcaaatcatccgactgcgcatttactaagggagattatttgtgggcgattccaagaaatcaaatcaacctgaattcaaatctggtacaaaatccgggatattaatcattcaatcgtttaacgtataataccatagattatatgaagtttttattcaaatatacatttcacttggcaatacttgcttgtgtttccgcacttttctccggttgtgagcaagaccccaagtatagagtttatgattatcctgtgccggtagtggagagcatttatcctacggacggatatgtcactacacaggtagttattacgggaaccaattttggtgaccgtgctgaagctgtgaaagttttcttcggtgaagtccaatccaataaagtgctcgattgcaaaaataaccgtttggtagtggaagtgccggaaactgcagtaacaggcaatctgtctttacagatttataataaaaaggtggagaatatcggtcattatacagtactgcctacaccacgtgtcattacagtgacttctgatagtgaagacggtgaaggggtagccgatacgggagacaaggttactataacaggtgaaaactttggtacggatccatccgatatttctgttagtttcaatggaacgccggccgaatttgagctggtggatgagtctactattgttgcgacaactcctgctgattataagacaggtaatgtgactgtaactattcatggatatacaatgacaggtagtgcaatgtttaatcctaactcaaagggtgatgtgacagtgctttatcttcaaaactataagcagccgtttgccaaggcaaatgatgaaagttggaagaacggtgaatggtggactccggcagtgtggaatcaaaataaagcatctttcaatgccaaaaacaatactactgttaccggaatgcagtataaagcagcagagggcttcacattagcgttccagaatggatgggataaagaagcttatacgaatgggaaaatatggcaagttgctacacttcgtcctggtaaatacagactggaagttacttatgcctatacgatggtagtaagtgatgcggggaattttatttctgcattgatggctaaaggaaatagtgagagtgatataccgaatgtagctgatattgagcaattaaatggagtttgtgcgatctatgacaaagctggaataaatgatgactcgggtattttggtaacaccttcatttgaagtgacggagacaacggatgttgtcattggattcctgacttctctggctaaaggtaattcatactttaaggtgacagaattgaaattgattcttgaatgatgtggaaaaagaaaaaagagtaattcatcgtgataatataattaagattatgaagaaaatatataactatctgtttcccgtttttctctcgcttttcgcattagctgcttgtgacgaggataacgaagaaattgtttcaatgagttacactgatcctgtggcgactgtaacaaagatagatcccgtagaaggatatgttgggaatgagtttaccgtaagtggcagtgattttggtatcataacagaagatgtgaaagtatttatcggttcccaggaggcagtagtagtctcctgcgccgatgatgctatccttgcgaaagtgccggaatcggcaacaaacggaaagataaccgttgaggttttcgggcaacgtgtggagactgatctagtttatcgtgtacttggtaagccgggtgtcagcgtagtgaaaccttcttatggttttccgggtgccagtatcgttttcgaaggacaagaatttgtttcttctaaaacactgtatactttgactttcgggacttccacagacaaggcagagattgtgggtacacctactgataccgaatttacggccaaaattcccgagacagctgtcagtggagttatgacacttattatggcagaacaaacgattgatttggcttcttatcctttcactgtgttgaagcatgcaacgcttgatactcctaaggaagacgaaccggttccatcaggttttgctggcagtaaatttgcaataacaggaaccaatcttgtgcaagaattgctggataagtctgttgaagggttggagcctttgaaagtaactttctctaaagctggcggagaacctgtagaagctgcaatagatacagataatttgacggataagagtattccactcactgtaccggcttcgttggaagccggagattatacaattactgtcattactccgtttgaaactatcgggacacagttgaaatatacggtattaccgatgccgacagtaacaggcatttcaacgaaagccggatatattaatgcggaagtaacgatcattggtcagaactttggtacgaaagctgaaaatattcaggtctttttcggagaaacagtttgtgataaagtgacactgaatgataaaggtaatatcgtagtgaatgttcccaaaggagtttcatcagaagctccggtgaagattaaactgataattcagggtaaggaaatagagatgggcgaatcgggcacatttgaggtttgggaaactccggaaatcacttctgttgaaacaccgtatatttatccttatggtacattagtaaaagccggacaagaaataacatttacaggaaaaggttttggaacggataagaattctgttacagttacttttgagggaatatccgtacccgttacggttaaagagattactacgacttctattactgtaacggttccgcaaggtttcaatggtggaaaagtaacaatggtgtttgaaggtattgcacaacccgtagagagtgatatattgcaacctctgccgatggatggagatatttctcaatatgtactcatgaactataaacagccttttgaatatgtaaaagaaggtggagataaaggattccataaaaaaggagagtgggcaaaagctgcttattggatagttcagaattctaacttgactgctggtgaaggaggtgctgctgttgatttggcatttaaaacgaaatatggtgatggaagtgatgcaggtttggctttacaaacagattggggatttgacaatcctaaaaatgatggtaaggtatatcagacttctcatcttcaaaaaggaaaatataagttgacggcacacgtttatgaatatgacggcagaggttttaccggttatgttgcggtttgtaaaggtaatgagatggcaaatacgagtgatatacaaagtaagagtctggcaaacgcttctatttcgggtacgggtgatgtagtagttgatattcttgttgaagagcctaccgatgttgtcattggttttgtatgtacgattacagtaaaacaaggacgggctaagatagataatttcaaattagagttagtagagcaataaactataattgggtgcaccgtaatcaatggtagatatggtgtaccattaaaccaaaaatatgatgaaaaagatatattacctcaaatccgcaactacgcgcctaatatgatacagaagcgaaaagaatctgcatcgttagtaaaaagggggcacagtgcatcgaatgtcaccataaagacatataaatgccccttaccccaccatgcgacttgaggcaatacgcaaaatcacgactataagttgtcggtgttatccaaagtcattctggaacacattggcataagcattgttgcatgaatagatattcagcacatacttccttgatgtcctgacccatttggctggcacagagatgaacttaaagacaaacgtcttgatgcggcttgttgctttgagtccgaacctcttcacgtcaagcctcgccatgatgaatttatagaagttgcgtatgagtgccataagcagaagaaacaccgtgttttctcccataaaggattttggaagcctgttccagccgaatccgttattcatatcatcgaagatgcgttccttccctccacggaggttatagaattcgacaatctctttctcggaagactcgtagtcatttgtaaggatgcagcggtaggtgtattctccttcccacaggtcgagttcgccgtctatccgcttctgtctttgaatcacaagacggtatgccttccctttccatttctcgatgagaatggaggccagctcaaactcaatgccgcccaattccactttcttccaacctctgagggcaaagatgtcattgtagagcgaactgcatcggttagcacggatatagaaggtcttgcagtgtttagcaatctcttccactatctcttcagaacacgagccgcaatcagctctgaaacggttgataataagcttgttttgttcaaacctttcaaagaacctcttcagcgtgtccttctggtggaaacggacatttgtgttgccgtcgctgttctcaatgccgacaatcaagttgccaataaccgccacgccagggcgataaccaaggaacttcttgtatgtaggcttcgcatcaaacttctcagcctctatgaactggtggtcgaagtcaacgtcatacccctcgccctctttcagctgccctgtggacaataggcaattgaggagcagtgtattcagcttgtctgccgtgttgaagtcgtaggtcttgccagtgtcggatgtgtaggaaatgttatcctgggtcagttcctttatggctctaagaatcgtgtcggcactgcatgtgcgaagtgtcggatgaagcgaaaggtggtacatcagatgagtggtgacatcctcgatgcatgagccgccacaaaaataaacgctcataagcgaacggatgatttcgctgtattgataaccatacagcctgcatctcataccgagggttgagtcgattacagatgagagtctggagtcaaattgctccattattgaaaatattcctccaaaaggagtgagtttctcggatttaattgctacctttgccatgtctgtcgggtttgatacatattttgatttgcaacactaagataggtgaaaaatctgacatggcaaattcctgagcaactttttgttgctcaggtacttaaaaagttatatttgtaatagtgttgcggaattaaggtattatataaccgcagtatttgctaccctgtttttggtaggatgtggggacggcattgaccttccgggtgtcaatgtggaaactgatttgaataaaattcctcttcctgataataacgtaaatttggaacaagttgaacttaaaccgtcaacggaacccatgctgcatgaagggttgcatacggaggaagacttccagcgtatccgggataaaaaagcagccggagaagagccttgggttagcgcttatcaattattagtagaaagccagttttcgcagaagacggcagatacttatcctacagaatggattaaacgtggagtttccggtgatgaaaattatatgaatgcagccagaggagccactattgtatatcagcaagcgcttcgttggaaaattgaacaagatgatgaatatgcggcaaaagcggtggagaatctgaataagtgggtacagacttgtgtaggtgtaacaggtaatacgaatttatcgcttgctgcaggactttatggttatgaatttgctattgccggtgaattattgagggattatggaggatgggatcgtgcggacttcgcagcgttccagaattggttgcttaaagtgttctatcctgctaatgatgattttctgaaacgtcatcacgatacgaatgcgttacattattgggctaactggtgtctttgtaatatagcggctaaaatggctatcggcattgtaaccgatcgtcgtgatatttataatgaaggtatcgcccatttgcagacaggtgatacaaacggacgtttacgtcgtgctatctatcacgattatgcaccggactataactttgctcaatggcaggaaagtggacgtgaccaaggacacacgttgatgtgtgtcggattgatgggaattatttgtcagttggcatggagccagggagacgatttctttgcttatgatgataatctcttcctacgggcctgcgaatatgccgcttgctgtaattataccaatgagactgtaccatatactacttatatatggcaaaaacagagtcaatggggatatccgattccggaagaacaaacaacacttggtggcggtaaatggatcaaacgtgcgatatgggcgttgccttattatcattacaaagggataaaaaatatctcgaatgataatctcaaatatactaagatagctacggaatatgtaggaatagaaggaggaggtgggtattatgacgctaactccggtggctatgacgtacttgggctcggtacgctgatgtatgcaagataaaatgaataaaatgtgttagacttcgccacagatttggatatgccagtgtggatggattatttgtatcaatctgtggtgaattcttggacattaacggtattagtaaaaacttgaaatgaataaactaataagaatagcgctcacatttttacttgtaatgaccacagggggcatacaagcagaaatagtcatctatccggtgcctcaaggcatctattatgcccgtcacaatgatgactatacggtaaaagtacggcaagtgggagaaaaagattgggtagacctttatgagtataacgtaaaggtggatatggatacgaagtccgatgccacgatggttcagttcgacttttcagggaaagtggaagtattggtacaaaagaacaatggggaaatccgttcggcagtggtgcgtcctttatctaaaggtatccaaccggagattgatggtaactttctattgtttacgatagataaaccacaaaagttatcggttgagtttaatggagatcgcctgaataatttgcatgtatttgccaatcctatcatcaaaaatgtgccggataagaatgatccgaacgtgatgtattttgaagctggaatacatgaaccgactgatacggctggaaaatgcttccgtattcccagtaatacgacggtttatttagaaggaggtgcagttttgaagggttgtctcacttgtgatagtgtcgaaaatgttaaaatcttgggacatggtatgctgctcgaaccgcaacagggaatatcaattgcttattcccggaatgtactgattgatggaataacggttgttaattcgcggcattacactgtttccggtggacaatctaccgggatcactatcaagaatctgaaatcatttagttatcagggctggagtgacggattggattttatgtcttgttccgatgtgttgattgatgatgtatttctccgtaattcagatgattgcatagcactctatacgcatcgttggaattattatggagattgccggaacgttcgtgtatttaactctactctatgggcggacattgcgcatcctatcaatatcggtacgcatggaaatacggaaacaggagatgaagttttggaagatatagtattcaaaaatatcgatatattggaacatgatgaggacgaccgtgattatcaaggttgcatgactatcaacgtaggggatcacaacttggcacaaaacattacttttgaggatattcgtgtggaacatattcaggaaggacagttatttcatcttcgggtgatgtataaccaaaaatacaatacaggtcccggcagaggtgtcaagaacataatattccgtaatatttcatgtatcgggaaatatatcaattcttctttaatagaaggttatgataagaataggaagattgagaatattttgttcgaaaacattgtgttgaacggtaggcggatcacttctttggaagaattgaatatagataaaaaagattttgtagagaagatacggataaagtagctaataactaaaagatgatagatgcgacaaaaaaacagtttttcgtgctttttgccgcatctattttatagaaagaggaataaacctatcgtaaaggagtgaatgaacctatataaatgcgttctattttcagggagatggcatttatttcgaataggccagtcacatctgatttataatcttcagttacatcttccactaaccaataaggaatcgggccaaggtctcgtgtggtgatactctttgaagtatcgggacgttcgggaagttcgggaagtttaaatttgcagtcatactctttgccattgattgtaatttggaatgtagtgcctgactctgatgtggagcgggagaagcttccttctattttcggagtattatttttactagtaacaattgtcactttaccactacttttttggtcataagagaaagctattcctcctgtagcttgtatacccgcttcatcctttatcttttttatgaccgcttccagtttttctttttgttgttcatccaacagactttcatctattcctgtgattcttgcttccacagaattcacagagaaagattgtttgccgttaacgacctttagccctatttttatgattcttccatcagcgtcttttaccatcaatgacgtgctgcccagttttatagagctgatttgaatatcattgttttcatccacataagctgtagcaatttgcccatcggctatttctgcagtatagggagctacgccacccttaattcccaactttgtacctcctgtgattgacaaactggtttcactaatgggaggttctgggttgagcatcacttcccagtattcaaacaggtaaaaatcgtcagcttcattgctgcatgaataaaatacgggaagggagcataatagaataaatagtagacagagcttcgtagtttttgctttcataatattcttcttttttatttcttcacaaaagtaaagctcctttcctgtatttcaaagtatattgatgaaacataagattagaactctatcttatgttgtttctcatcatccaccacagccatcattccttctacctgtgctaaagccagcatacgtccgtggaaagaataaccggcattgtaacctttatcctcatctccgagcatcattcgtccatgatctacgcgcatgggaagtcccggattctctttctcgaaaatgcggatgagatcaatcagatgtcctcttcctgatagatgagaactttcgatgaagtttccacccggcatggcctctgtactgcgtagatgaacgaaatgggttcttcctgcaaactttttagccaattcacgagtatcattatgtgcacctgcactaagagaaccagcacagaaagtcagcccattatgcggattgtctacggcattcaggaaccaggctatatcttcttcattggtgacaatacggggtaggccgagaacctggaatggaggatcatccgggtgtacacacatgttgataccatattcatcgcatacaggcataattgctgaaaggaagtaacacatattctctcgtaaagcatcccggtctatgtctttatataaacctaacagacgtttgaatatagcaaccgggtttttatctccttctttgatattaccgttcacaaatccttgtgtcttgacgataatagtatcaatcaaattgtccttttcggtctctgtaatcactttgtccagttcggcaactttatgcagttcttcttctgtgtagtctttttcagctccttcacgttccagtattttgatgtcgaagtaagcgaaacgaatacggtcgtagtaaagcgaactggtaccgtccggccaagggtactgtaaatccgtacgtatccagtcgattaccggcatgaagttgtaacagactgttttcactccgcatttacccaggttggcaagacttactttataattttcaatcaactgttcacgttccgtacccgcatatttgattgcctcacaaaccggaaggctttccacgaccgaccagcgcaacccatacgattcaatatacgattttaaatcgttgatggcttctactgtccaaatctctccgttcggtacctcgtgtaatgcagtgacgattccttcaacacctatctgacggagcatcggcaaggtgattttatctttcttgccgaaccatctccatgttttttccatcatagcgtttgaataaattaaaagattaaatattaaacgccgctgaatgcactgaaaccaccatcgataggcaacattgctcccgttacgaaactagcggcttcactgcacaggaattgtacagcaccgttcaattctttgatatcgccaaaacgattcatcggagttttggctaacacctttttacttctgtcggtcaatgaaccatccgggttgataagtacacgacggttttggtcaccgatgaagaatcccggagcgatagcatttacacggataccatcaccgtatttcagtgccatttcgcttgccagccattgagtgaagttggctactgcagtttttgcagccgaatatcccggtacacgggtgatagcgctataagcagccatagaagatacattgatgatgcatcctttcttctgttttgccattaccttaccgaatatcatagacggataaactgtaccgttcatattcaggttagtcactttttcccagcaagagatgtccatatcatagaagtgttgatccggttcgagagtagctcccggcatattgccaccggcaatattcaatagaatatcgatctgtccccatttggctacgacttcttcggctactttctccaggctggcgatgtcaagtacattaccgatgatgccgattacatcgttaccgtattgcttaagttcagccacacggttgtccagttgctcctgacgaatgtcaatagctacaacttttgctccctgctgtacaaagtgttgggcaatatttccgcccagtacaccacctgctccggtaataacagcaactttaccggcaatactaaataattcgttcatggtttctatcaaatgtttttatgaatggatgcaaaaatagcgggtttttatacatgctatgatgcgtatttttgcaagatatttacctatctttgcaaaagcagtttagaaaggagatttatgaggaagataatgaatgagaagttgactattacgacttctaatcccgtccgtgcccgcttttatgaatatccacgtttcacgtatccgtggcattttcatagtgagtatgaaattatttatgtggagaagggagagggggattgtctggtgggtgacagcattatctcctattcaaaaggtgatttgattcttttcggttccgaactgcctcatagtatgcaaagtccaccggacggcggggaagaatctgataacgaagaaaaatccgaactgaaagtaagaggagtcaatattcagtttgaaaaagacttcatgcattattctatatctcaatactcccagtttattcctatcaggaatttattggaggatgcttgcagaggaattaaattcacaattacccgttcggggaaaatcattaagctattaaaacaaataccttctgccaaaggagtagatcaaattatcctgttgctttcactcctacaaatgatggctaccagtaatcacaggaagtatctgactacttctcattatactccgtctccttcgattatgcgtaatgaaagaatggaaaaagtgattgcctatttgaataaacattataccgagtctatcggtctggatgaaattgcttcttatacagcgatgaaccctactgctttctgccgatactttaaagaaaacacaggaaaaacattcaaagagtatgtacttgatatgcgtatcggatatgcttgtaaactattgaatagtagtatgatgaatatatctcaaatcagtgctacttgcggatttgaatcacctgtacattttaaccgcatttttaaaagggtgacaggaatgacacctactttttatagggaacagatggaataagcttttcaggcaataaacatttgagtataatttctttctcgttcgtatataataggaaagatgaataaacatgaacgtaaatagaatgaagaaaagaattttgcttttgttgttggtgataccggcattgataaaagcgcaagatgtgatgacagaaacccgtcaggaactgacgtctcctgatggagcttatcgttttaccttttatcaacgtgcggtaggagaggataatgtacaaatgtattataccttgacttataaaaatcgtccggtgattgaagaaagtaaactgggtgttctgattgaaaatcagttgtttgaatcggcgttgggtataccgaatgatacttgtcatttttggtgtgagaatctgaagttgacggggactgaacatcaaaagacggacgagagatggaagcctgtatatggcgagcgtgcggaggttcgtgattgctataatgagatgaccttgaagttcaagaaaggagaaggaaaaggtaatcgggatggtggttatgataagcgtaaaaactactttatgaatatcatagtccgcgcctataatgaaggagttactttccgctatcattttccggaaatgacaaacgggcttttcttgcatatcgtcggtgagcagactagcttcacaatgcctgaaggaacgatggcgtattatgaacgttgggcacaagggccttatgaactccgtccgttggaaggatggggcaaagaggagagtgagcgtcctttgacattgaaactgcctgatggattatctgtagccttgttggaagcggaaatggtggattatgttcgtggtaaattccgtttatcggcagagaaaccttccactttggagacaagcctgtatagtagcgtcgatattatttctccttacagtactccgtggcgtgtaatcatggttggcgaacgtccggtcgatttaattaataataatgatcttgtcttgaatctgaatccggcttgcaaactggctgatacttcttggatcaaacccgggaaagtattccgttcgggcgacttgaaacaagatagagtaaaagcggccattgattttgcggcagaacgcggtattcagtatgtacacatggatgcaggctggtacggaccggaaatgaaaatgagttcggacgctactacagtttcttctgataaagaccttgatatacctgctttgtgtaaatatgccgaatcgaaaggaatcggacttatggtgtatgtcaatcagcgcgcattagtgcagcagttggatattctgttgcctttgtataaaaaatggggattgaaaggtatcaagttcggttttgtacagataggtaatcagcgttggagtacctggttgcatgatgcagttcgtaaatgtggagaatataatctgatggtagatattcatgacgaatatcgtccgacaggtttcagccgtacttatcctaacctgatgacgcaggaaggtattcgtggaaatgaagaaatgccggatgccacacacaatacgactcttcctttcacccgctatctggcaggtgcaggagactatacgctttgctatttcaataatcgggtgaagaatacgaaagcacatcagttggcgatggcagctgtgtattacagtcctttgcaatttatgttttggtatgacagaccggaattctaccagggagaagaagaactggaattttggaaagcaattccgagtgtatgggatgacagccgcgcgttagatggagagattggtgaatatatcgttcaggcacgtcgttcggggaatgactggtttgtaggagcaatgacgaatacggaagcccgcacaattacattgactacggattttctggaaccgggtaagaagtacatgcttcacctgtacgaagatgatgacaagctgaatacacgcacgaaagtacgcagtactcataagaagataaaagccggagataagcttgttttgaagctaaaagcaagtggcggagccgcattgcatttcactccgctaaagaaatgactcaaattattttgatggtcattgagtatgtgaaaatgacaagtaaatgataattttgcggagtgccctgaaagggcttaattatatagcgtagggcaacgccctacgaaaaagacacatcggccacaagccctgaaagggcggaaccgtatacaattatgccctttcagggcgcaaattcagattgctgtttttacgtagggcgttgccctacgctatataattaagccctttcagggcaccccaataaatatataattgtaaggctttcagcctaaccgataaattctcatttaaccgctaaattcccatttgtagtctttattgggatttactacttaccactatttaccataattaatcaaccacttcaccatctccggatcatagtgggagaaaaagagtgttttagctgtatcaagcgcagcgatagccgccatatcgtccggtgttaacgaaaaatcgaaaacattgaaattctcaatcatacgttctttatgagtcgatttaggaatcacgatgatattgcgttgaatcagataacgcagtgcgacctgtgccactgatttgccatattctttaccgatttcctggagagtcgggttggtaaagaagtcgtttcgtccttcagcaaacggtccccatgacataattttagtaccatattctttcattacttcctgcaactttatctgttggttgaaaacgtgtgtctctacctgattgacggcaggagtaatttcacagaattctgccaagtctataaagcggtcaggatagaagttgctgacaccgattgcacggagtttaccagccttatatgcttcctccatagcccggtaagttccataataatcaccgaatggctgatgaatgagcagtaagtctatataatcactttttaatttgtgaagtgattcatcaatagaagctttagctttttcgtaaccggcatttgaaatccatacttttgtagtgatgaacagttccccacgtggtacgccgcatttactgattgcatttccaacaccttcttcgttatgataggcttgtgccgtatcaatagaacgatagcccacactgattgcatccgacacgcaacgttcacactcttcaggcgtaacctgataaacaccataacctaaaataggcatttcaatgccattgttcaattttactttttccataatcgagtatattattaaaataaaagcgtattctaatgtttttattatctttatttcctctatacaaagttagtctgtaaaaggtaatctgtttttatatagattacgggttttgctaccttttttacggataactctatctttgcatttaatatctactattatatagtcgttttttgagtattttgttcttcatattcgtagtataggaagttaaatcaattaaaagaagcattatgaataaatattttcttgttgtattgttgtcattattcatgcaggttgctaaggtggcagcagccccctggcaatggtcagtggaaataaaagagctgatttcagaagagacaaacgcccacccttctgcctatctatggataccggaaaactgtaaacaagtccgtgccgtcatcatcgggcaacacaatatgaccgaagaaacaattttcgagcatcctgaatttcggaagaatatgggcaaactgggaattgcagagatatggatcactcccggaatagaccaacgctgggacgtgacaaaaggtacccaacaaatctttgaaacaatgatgaagaacttgtctgaaataagcggatatacagaactggagtttgccccggttatacccatcggacactcggcaatggctacttatccgtggaactttgccgcctggaatcctgaacgtacattggccgtactctctattcacggtgattctcccagaactcatttgacgggttacgggcgtgcgaatttggattggggaacccgtacgattgaaggtatcccctcattaatggtaatgggagaggacgaatggtgggaagaccggttgataacctctttcgattatcgtcgtgaatatccgaatgctcccctttcatttcttgctgatgcaggacacggacatttcgacatatccgatgaattgattgattatctttccctctttctgaaaaagacagtggaatatcggttgccggagcattcgtcattggatgctccgattcagttaattccggtagaagcaaagaatggctggctggcagaccgttggcgaaagaatgaaaagcctacagccgaagccgcttcctatgataagtataaaggagataagaaccatgcgttttggtattttgataaggaaatggcagatgccacagaaaaatattacgccaatgagcgtggaaagacagagcagtatatcggctttgagcaaaaaggaaaactgatcactttcaatccgaaatcccatgtacgtatgtctccttcttttcaacccgaagcggacggagtcactttccacctgaaagcagtgtacacagatacgttaaggaacgaatattcaaaagaacacagtacgcatcccattcgaatgtcgagaatttgcggtccggtggaagtggtgaatgatacaacttttactgttcgtttctatcggatgggattggataatcctaaacgtacaggaggcatctgtctgatggcttccgtaaaacaggatcataaataccggagtgccgttcagcaggtagagattcgtattccttaccggaataaggaagggatatcccaacgtataattttcccgaaactatccgatgtaaaagcttcagtgaaaaaaataagtttaaatggaactgctgactccggccttccggtttactattatgtaaaagaaggtccggcagagataaagggagataaactggtattgactaaaattcccccacgtgcaaaatttccggtaaaggtgacagtggtagcctggcaatatgggcgtagcggagaacctaaagtgcagactgctgaagcagtagaacagagcttttatattactgcccgttagtttgacaaagagattgttcaaggaatcagagtactaattccttgaacaatctttccaaagtcttatctaaatcagtagaaaatcccggatgtgggcgagatacttgtatgcaggaactttttactgcagtcagccaacgaaatctgtcaggaatatccatattggctatggctcctccctctttatttcccatgcatatcttgtcaaagacctgtaacccttctttcaggcaattcatatccagttcggaagaaaacagttttagtttgttctcatctatcgtatagagggatttcaggtatttggcttgtttggaaaacaacacaatccccatattgataaactcctcccgttctactttaggaacgaaacggatgactgcgtattcatataagtgcctttcttgcattttgcgcttcatttacaaatgtttcggaatgtttcatcctttcttctaagaatcgaatataaatgtctctcaaatcctgtggagtttctgtgccttctgtccagttcaaccagtcgtcgggaatagcattgactatctcacggattttatccgaagtcaatatctgtctgaattcgatatctacctcttccagtttatcggcaaacggtaataatacatggtcttttatctgtacaaaaggaaccaatgcctgtttttgccagttagtccaggaatggtggaaataaagggacgccccatgatctatcagccatagttctttgtgccatatcaacatattggtgtttttaatggtacggtctacgttagtcagcaaggcatccagccatactacttgcgaagccgtttttccatctacttgatgtactatcggatcaaaggtcaacgaaccggaaaggaaatgcaatcccatattcagtcctcgactccattgaagtaaatcctgtatctcttcgtctgcttccgttcgtccgaaggcctcgtccagattcagaaaaactatttcggggactctgaaacccagtgcacgggctatctccccaccaatcagttcggcaatcagcgcttttgttccgtgtcctgcccccctgaatttgactacatacttaaattcatcgtcagcttcggctagagcaggcaatgagcctccctcacgcagaggaagaatatatcttgtaacatttgccgtacgtaaatccatgtagctcctttctttaatttggggaataaagataggacgtttcagatgaattttataagaaagtgggctttaaattaaagaattgtagcttaattaaataattttgtggctttgagtgtttaaggcaccttgttcgtatcttatagataaaagatagaaataatatgaataagaaagttttagttacggcaatcttgtttggttcattgacagtatcgggtatagtgtcagctcaatctgtatatcccggacaacatcagggaaagttgaaaaaggaaacagtggctccccttcaggcggaaagttttgatttgaaagatgttcgcctgttgccaagtcgtttccgtgataatatgcttcgggattctgcctggatgacgtcaatagatgtgaatcgtctgctacatagcttccgtaccaatgccggtgtatttgccggacgtgagggcggatatatgacagtgaagaaactgggtggttgggaatctttggattgcgaacttcgcggacatactaccggacacatgctctcggcacttggtttgatgtatgcagctaccggcagtgagatattcaaactgaaaggcgatagcttggttaacggattggaagaagtgcagaatgcactgaaaaacgggtatttgagtgcctggcccgaggaactgataaaccggaatattcagggaaaaggtgtatgggctccctggtatactatgcacaaacttttctccgggctgatagatcaatatctgtatgcggataataagaaagcattgactatcgtcacccgaatgggtgattgggcatacaataaattgaaaccccttagtgaagaaacacgtaaacttatgatccgcaatgaatttggcggtatcaatgagtcattctataatttatactcaataacgggagatgaacgttatcgctggctggcggaatatttctaccacaatgacgtaatcgacccattgaaagaacttcgtgatgacttgggaacgaagcataccaatactttcatcccgaaagtgatagccgaagcccgtaactacgagttaacccgcaacgagacaagcaggaaactaacggaattcttctggcacaccatgattgaccatcatacttttgctccgggatgtagcagtgacaaagaacactactttgatccgaagaagttatcccaacatctgaccggctataccggagaaacttgttgtacctataatatgctcaaacttagccgccatcttttctgctggacgggcgattcatctattgcagattattacgaaagggcattgtataatcacatcttgggacaacaagaccctgaaacaggtatggtagcttatttcctgcctctgctttccgggtctcataaactgtatagcacaaaagagaactctttctggtgttgcgtaggtagcggatttgaaaatcatgcaaagtttggagaagccatctactaccataacaatcagggaatatatgtaaatctatttatcccttcacaggtaacctggaaagaaaaaggactgacaatccgtcaggaaacggaattcccacaggaagaaacaacgcgtttcactctccggacagaaaatcccgttcgtaccaccatttatctgcgctatccttcgtggagcaaggatgtaaaagtgttggtaaatggtaagaaaatatctgtgaaacagaaacctggttcttatattgccattacccgtgaatggaaagatggcgaccaaatctcggctacttatccgatgcaaatcaaactggaggctaccccggataatccgaacaaggcagctctattatatggtccgttggtattggcgggagaacggggaactgaaggtatgcaagcacctgctcctttctcaaatcctgctctttataatgattattatacttataattttcatgtccctgcacatttgcgtacctctttgaaactggataagaaacaccctgaacgtgctttgcaacgtgtaggaagtgatttgaagtttacgacagaacaaggagatgtgattcgtccgctatacgatttgcatcgccagcgctatgtcgtatattgggatttacaatcagaaaaatagatagtaaacaacgaaatgaagaatcgtttattaattgccgcttttgtaagtatctgctttttgtccggttcttgcaaaatatcatccggtcagggaagtcggtatgacttctcttctttggattctgttatccaaggatgggtagacaagggatattaccccggagcatccatttgtgtagtgaagaatgataccgtcatttttcagaagaactatcgggattatacacccgatacaaaagtatatgtcgcttctgccggaaaatgggtagcggctgctgtcataggcgcggtggtagaccgtactgatttgggatgggatgatccggtagaaaaatggttgccggaatttaaagacgatgctaaaggtaagattcttctccggcaattattatcccatacatcaggagtacgtccatatcttcccgagccccgtgtagataactataatcatttggattcggcagtcactgaaattcttcctttggatacaatctttactcccggcactcgttttgaatatggtggacttgccatgcaaattgccggaagaatggcagaagtggcgatgggaaaggagtttgagactctttttcaggaactgctggcacaacctttggaaatgaagaactcttattttaccccaatcaacacggacggcggacatgcccccatgttagggggcggactgtgtactacaatgaatgattatcttcacttcctgtccatgatttatcacgatggaatgtataatggcaagcaaattatatcagcagaaactgtgaaagaaatgcaggccgaccaagtgaaaggcgccataattccttcgaatgactcggataattatgtagcgaaaggactgggacaatcccacaatggaatctacggattaggagaatggcgtgaattaatagataaaaagacaggcgaagcttatcagattagttcaccgggatgggccggtgcttatccgtggataaataaacacgataaagtttacgggttcttcatttctcatgtaacaggttcttctgctaaagaagacggtttctcttctttctttggcagccctgtcatttcacggaccgtttcggaaatactgaaagggaagccattggttgtcaaacaaggacgtatcaatgtaggaaatggctctctatactatgaggaagccggtcagggtgaaccgatcatctttgtacacggtcattcgcttgaccatcgtatgtgggatgagcaattttctgtgtttgcgaaaaagtatcatgtcattcgctatgatttaagaggatacggcatttcttcttcccaaacagaagattatcaatttatgcatgttgaagatctggttactttgatggactctttgcacatcaagaaagcgcatatcgtcggactttctttggggggatttatcactgctgatatgttggcgtatttcccagaccggatgttatcggcttttttagccagtggaaacatccgaaagtccaaaggtcccagtgaaccgatgactaaagaggaagcaaaggtacgtgatgacgaaatagctgccctgaaaaagaaaggagtggaagtgatgaagaaagagtggtttgaaggattaatgaaatccggtggtagccagcgtgaacggatgcgtgtgcctttgtggcagatgattgacgaatgggatgcgtggcaaccgctacacaaagaagtacgggtagtagcagggctggatgctattgaagaattgaagaagagtcaccctgctgtacctgccttaattgtagaaggtcattcttctgataacaaattttcaaaaaatcctcccatattggaatatctacctaatggaaagctgaaaatcatagaggattgcgggcacatgatgaatatggagcgaccggaggaattcaatgcagctttagaagaatttttaatcaatattgaacagtaaaatgaaaaagcaataaatatcatgaaacaaatagttctatgcctgatcggaatattattagcatcgtttgtatctgcacaaaagataaatcatccttcacttttgtacacccctcaacgcattcagcaggtaaaacaacgtatgcagaatgaaccgaaattgcgggaagcctgggaggatattcagaaaaccgccgatgaagctttacaaaagaaagatttcaatcggttggattatttgtcgttggcttatctgatgacggataataaagagtatgcaaatataatcaaagagattcttttgaaagctgtggaagccgaatcctggggagatatggaaatgatggcacgtattccagtctggcgttcgcaactgggcatggcacataagagcttcctttctgccataggatatgatgcggcttataacataatgtcttcttcggaaagaaaaaagattgccgaaggcttgaaacgattggctgtagagcctgccttgggcgactggctgttggaacctacccgaatccattctttgaactctatgggacacaactggtggacttcctgtggatgccagggtggaatattagcattaagcctacagaatgaacttcccgaagtaaaagattgggtggagcaacttcatgaatcacttcccgaatggtttgactttgccggcgatgccttgcaacagaaagcaaagagttttgatgaggccggaggaatgtatgaaagtttgaattatgcaaactttggtattcaggaagccctattgtttcgaatcgcttggataaacactcatccgggacaaaatcccggcaatataccccaattggcaaaacttccgaactacttttctcaagtatgctatcctcgtacaggtatgctgtatagtttgaattttggtgatagtcataagaatgtatcagcagaatccagtatgatgttattgtatgcattgggactgaaagacccgactattctgtggtatatagcccaagtagagcaaggacagcatcgcgatggatttttcctgaatcgtccgatgggctttctctatacccctgatttgagtaaagctcccgtaactcccgatttgaaaacctcacagctattctcggatttcggttgggccaccatgcgtacttcttgggagaaggatgctacgatgcttgctgtgaaaagcggtcatacgtggaatcattcccatgcggatgccaactcctttattgtttttcataaaggcgttgatattatcaaggatggaggaaactgctggtatcccaatcctgcctatcgcaactatttttttcaaagccaggcacataatgtagtcctgttcaacggggagggacaacctcgtgaacaacagtatagcggctctactttgcgaggaaatctttatcatctcttggatgcgggcaatgtgaaatatgttttggccaatggaacaggtcctgtctctaataatttcagccgtaacttccgtcatttcctgtggatggataatgtgatttatatgatcgatgatttgaagacacataaggtaggacagttcgaatggttatggcataccaatggaacttataagaaatcgggcattgacgtgaatgtgacaaacggaaattcttcagtagtcatccgtcctttatatccccgcatgctggctaagtccgattttgtgcacgactatcccgaagatttatattgggaagaaatagaagctcctacggaagatttgaaaggaaccgaaaaatattattcattccatttaccagtcgaggtgaaccgtgtgaaaggactgacagctattattctgaaagacgctcccgatgaaaaagacctgcctcaaatggaaagacgtgaagggcaggactggatagggcttcgtatccgtcataaaggtaaaattaccgatttatatatcaaccaactggcggacggaagattaatgcacagtaattcatggattatgcccgacggctggatgacagatgcttatatgtttgcagtttcttacccagaaggtactgaagcaaagaacgctaaggacttctttattgcttatggaagtgcattgagacggggtaatgaaacttacttttcatcattggctaagctgttcgttattcagaaagcagaaggtaagaaacttgatctttggatagacggacagccgaagataaataccacctttagaagcacaaagaagcctatgtctgtagaagtgaatgataagaaaatcccggtagtttatcagaaatcacagataaaggtgaaactgtaaattatgtatatccaggatagattctatctttttaaagagagtaagttccttgttttttgtgcaaacctatataaaatccgagatattttatgtaggtttgcattgtttcattaaatatgaatcctctatgcataatctaatacgacatatagtaaaggctttgactactctttgtctgctactcataaatatacctatttatccgatttcttactctttccgcagcatttccgaaacagacggactttccgacctgatggtcagttctttttataaagattcattaggctatatttggattggcacggcaagttctgttgaacgttttgacggagtccatttgaaacattatcccatattagggaataatgaaaaactaaaatgggtgaatgtaataacagagacgactggtaataggatatggatagggaatgatatgggattgtggacggttcataaggaaacagaaaaactggaaccctttagtccggagactattaattgtggtgttcgtgcccttttaccaactcgggatggaggattgtatataggtagtgaaaaaggattatttatctatcgaaataatcaattggagcgactggcagtaagttccgacatcttatcggcagaaaatttcatcgttgcattgaatttggatgaaaatggagctttatggattcttaccaaaggtggattacattccatgaatatttcaaaccggaaaataacctcttatccatacaagcagggattctcctatagaaatatgacacgtatcggcaaaaagctttatttaggaacaatggatcatgggttgctatgttttgatatctcgacgggtgaatttaaagaaaatattattgacttgggttgtaatgttatcatgtctctctccagtgatgaaaagaatttgttgtatataggcactgatggaaacggggtacattttgtttctgcgaataatatgaagattgttcgttccttttgttacgaatcgggaaataaacaggcgatccgttccaattctgtctatgcattattggttgatagggaaggagtgatttggattggtttttatcagttaggcttggattatacactatatcagagcgggttattttctacctatgcctatcttccttatttcgactcaaaagagatgcctgttcgtgcaatagctgtttcgaaagacgagaaactgataggttcgcgcaatggacttttctatatagacgaaaagaaacagcggtttaaaagttttaaggttcccgaattacgttccaatatgatcttgtgtatttatgcttttgaaggaaagtattacataggtacttatggtggcggtatatatatcctcaacccttccacgttgactttatccgattttgaaacagcagacttaaaatcagctccattcctgaaaggacatgtgttttgcataaaatcggatgatgaaggaagtttgtggatggcgacgtctatgggactttactgttatagagatggaaagcaaatccggcattatactaccgaaaattcgaaattaccgggagaaaatgtatatgatatatgttttgattccactcgtaaaggatggatttgtacagaaaacggtttatgcatttgggatccgtcaaccaatagtttgaagtcggatatgtttcctgaagggtttattcataaagataaaatccggacagtatacgaagattctaatcatgagctttatttccttccggataaaggtgcaatttttatatctgatttgtcgatgaatcattttcggagaatgcagtcgggcactcctttggatggaaaggatgcaatgtttattatagaagatcatgaaggttggttgtggattggtactaattggggcttatatcgttatgataaaaaagataattttattccctataatttcgtagatggcttgcctagttctatatttattacttgtttccctgtgatagatgaagagggtacgatgtggttcggcaactcgaaaggtatgatttatctgatctcggaacaaaatggcagaaaagcaaaatggcattatccggttgcttttaccgatgtattagtgaatggaaagcaatcggtttatgctaagatgagcagagaaaataacgtgtataaaataaaattggaagcagatcagcgtaatctgacaatccgtttctctgggttcacctattcggagcctgcatatatgtcttataaatgtaagatggaagggatagatagcgactggcaattattgagtggacaatctgaaataacctattatgatttatcatcaggtaattatcagtttagaattcatcgggtggatgatccggagtcagaaatttgtctgatggtgactattgctcctcgcttcaatgctgttatgtggagtgtgactgttttagtgatattgataataactttcttatatatatattatcgccggagaataaaacgaaacaacctaattcaatcgaaggaaaaacagcaaccggtgattgaagaaaaatatagaaagagcaatgtgactgaagaagaatgtagacgcttgactggcgagctggaatttctgatgcaaagggatcgattatatgttaatccaaatctgaaaatagcagatttggctgcaatattgaatgtttccacttatacattatcctatttattcaatcaatatttggataaaaactattatgactatttgaatgactatcgcatagaagagtttaagcgtttagttggtaaagatgaatattctaaatatacgttgacagctttagccgaactatgtggttttagttcgcgcacctctttctttcgctattttaaaaaggttattggaattactccgaatgaatatattcgaagtatcggaaagactaatggagaatagtatacctatgtaccttttattttaaactttagattgataaatatctctttagagtctcaatttattatttgagactctctgaggttataagttaactgcttgataattagattgtatttaggttgcttgctctctgccaataggacggaatttatctctttctttttgaatatccgttttcatatttaccctctatatttgccaacgtaatgataaacaaaaatctaagcaatggaaaatatagatatgtcatccgtacagttgattactgattcttatcagaattatcatcattccgtttacttgtatatcttatataagataggaaaagatgaagacgcgaaagatctggctcaagatgtatttttacgtttgatggattataagcaaatgttgcgaccggaaacagtaaagtattttatcttctctatttgtcggaatctggttactgattatctgcgtcgtcattataaaatgcaggaaatcacatcttattttttagatcagattcctacctctaccaatgacgacgtagagagtcagataatagccaatgatatatctacatgtgagcagaacaggatttttcggcttcctacacaacggaggaaaatttatgcgatgagccgtttcggtcataaatcatcagcggatatttccgcttgtctcgggttatctgtccgtacagtagaaaaccatttgtttatcagccggaaagaaatccgcgaatatatccaacagtgtatctaatattagaataaatagtataaatgttagttttaaattttatgtatatgaaaaaaaatctcttcagattttcatcgagaaggattctattctccacggtggtagcctctgctcttctagcaggtggttcgcagactgtctttgcagatgctggggaagtacaagccgtattacaggctggtgcaatcaaaggaaaaattgtggattccaatggcgatcctgtcatcggtgccaatgttatggttaaaggtaccactaacgggacaataaccgatatagatggaaattttgttttaaataatgtatcgggcggtactttgactatctcttttataggttataagacattggaaattcccgtaaaaggcacgaatttggcacgtattgtcatgcacgaagatacagaagtattggatgaagtcgtagtagtcggttatggtacaatgaaaaaagaatcgttgaccggttcggtagccgtagtagaccagaaaatatttaaagacaaaggtacagtagccaacccactccaggcaatgcagggacaagtgccgggcttgcggattacacgctcttcagcagctcctggagaagaaggctggggcatttctattcgtggtgcagtatctaaaaactcaacagaacctttactgataatagacggtgttccggctagcggtgtgagtgaaatggctcaactgaatactgctgatatagaatccatcaatttcttaaaagacgcatctgccgccatttacggatctaaagcagcaggtggagtaattctcgttacaactaaaaaggcgaagggcggaaaaccgagagttgaatataatggttcatatacccgtaaaaaagtagggctacaaccccggatgatgagctatgacgagtggatggatggcattatccaggcatgttataatgatggtaggggagatgactacacttgggtgcgttatgctaaactggcacagaagatgaaaggaaagtatatagacctgaccgatggacaaaaccctgatccgattcctggttcatttgcaggagttgcggacttcgtatttatggatgatgttaactggactgatgttttgtggggaggtgccaactcaacacagcatgacttgagtatatcaggggggactgataaaaatacttaccgtttatccgcaggatatttgtatgacgaaggaactttgcaatggggaaataattcaaatgagcgctttaatgtacgtctttcaaacagctttaagttgacagaacgcttttctgttgagtctgtaatgtcggcaagtcgccaaaatcaagtatctcccactcaaataggggctacattaggtgtgtccatcccgcagccggggtttccggtttccactattgatggtaaaccttatgcatggggtggacaatatactcgtaactggcaggcggaattaggtggtgacaataaattggttgtaactgcaatgaatgtgaacgaacagtttaaatataatctgatgaaagggttggatgtcaatgtaacattaggatatagcacgaatagcgcaatcagggatgaacaatacctttccatccagtggtatagctataatggaaatccgataaaaagtgaaaatagtccgttcccgactcaggatgacagttcttatacgaaaagttcggcacgcacggataattatacagcagcagcatttttgagttatactacccaattgaatgaggtgcatggtcttactgccatggtaggaactcagtatgaccggacagaatatgaatacagcagtacaaaggccaagaatgtagatccgactttaggagttttgaatggaacaggtatcgtatctattgataaggtggataaatggaaagaagctatcatgtcctattttggccgtgtgaattataattataaagaaaagtatctgattgaggcaaatgcccgttatgacggctcttcaaagtttcagccggaaaatcgttggaatttcttttatggcttttccggtggatggcgaattacccaggaaccttttatggaagtggtaagaaattatgtagatgaaattaaattgagggcttcctatggtgaggttggtaatcagagtggtattagtcgctatgatggcattcagttatatgaatcggtatccaatgcaggagcatatttgggtgacggattgacttcatatttgaaagctggcaacttggttagtacggagagaacctgggaacgtattcacaattataatttgggcttggatttcacagcactaagaggccgtttatccggtagttttgagctttttatgaaaaagaataataatatgcttgtaggcaaactatatccgggagtattgggaagcaaagctcccgatatgaacagcggtaaatttgaaagtaaaggatatgacgggacattgatatggaaagataaaatctcggactttagctatcatgtaggagcgactttgacatatatggagaataagttaatcagcggtggtgagaatgtgaaagccgtaggttacaattctgcattgaacgattatccgttgaattctgtatttggttatcgttgcgttggtaaaatacagaatgaggaacaattgaagaaatacaaggaacgctatcttatgaataatagtatcggaataccggctaatttgagacttggagacaacatgtatgaggatgttaataatgacggtaagttgagtcaggaggatttgatctatttaggttccgacgatcccaaattctcattctcttttaatcttggatttgcatggaagggaattgacttctctgcagttcttcagggagtaggaaaaagaactgtttaccgtagcattgatgcctggaaagtaccttttaaagcaatttggctgaataccaccaatcaatcggtaggcaatgtctggagtccggaaacgccggataattactatccgacttatacaaacaacacgaatctgaatgattataattatatgtcttctacgtggtctgctgataatggtgcttatttaaggctgaaagatgtggtgttgggatatacattacccaaatctgtactgaataaaatggggaatttcatgaccaacttgagagtatatgtatcaggaagtgatttgtgggagaaatcttacattcatgatggatgggatccggaagcaacccggaaagtagaaaataaacaacgctatccattcaatagaacatttacagtaggagttaatgcaactttttaaatagaatgaattatgaaacagtttaaattatatatggttttattgtcggctctttgtttttctttccagtcatgtttggatttggaaccggaagctcaattggcagagacgaatctttggaagaatcccgaacaatataaattatttgccagtcaattttatagttggacacgtgattttaaagctttggatgacggccctcatagcgacggacgttcagacttaaggactggtgctaccttggatgtgtatagtaacggtacatattccataccttcttcggataagaattataccgataattatgaccgcatccgtcaagtaaatcttcttttgcagaatgcggaaaattatccgataaaagaagatataaagacatcagttggcgaggcacgatttttccgtgcttatttacactttgatttattacaggtctatggtgatattattatagtacggcaaccgttgggaatcacatctgcggaattgcagaaagcaagagattcccgcgaagatgtcatcgactttataatccaggatttgagagaagcgatagatatgcttcctgcttttaagaatattgcggcatctgatgaaggacgtgtttcaagagaggcggcacaagcttttctgtcaagagtagctttatatgaaggtacttggctgaaatcccgtaatggaaatcaaaatacagagcggtctaaatctttattggatatagctgtaaatgctgctgacgaagttatcaaaagcaatacattctctctattcaaaccgggcgaagaactggctactaccgcctataagtatctttttatactggaaaatgtaaaatccaatccggcaggattgacgaaaaaggataataaggaatatattttttaccggagacatgatgaggttattagcgccattggatttaatattacccaggggcgtttaggtaatgcactgtatattacacgtaaaatggctaatatgtatcttgataaaaacgggcttccgattgatccggctgtttggaattatcaggatatggaatccgagtttcaaggccgtgacaatcgcatggtaaatacgatgatggtcaatggtgactattattggagtaatggccccggacgggtgaattggacaggggatgccgatgataagaagaatgccacctttgctccgtttaatcctgcacaaaaaggaggcagcggctattttacacaaaaatggtgtaccgaacgaacggttgcaacaggaaaagagggatatgattttccgattatccgctatgcggaagtattattaaattatgcggaagcaatattcgagcgtgatgacgagatttcggatactgatttaaagaaatcattgaacctggtacgtaaacgtataaatcctgatatgaaagacctgactaatcagtttgtagcggagaatggacttaatatgcgtacggaaattcgcagagaacgcacagtagagctttttgatgaaggattcagaatggatgacttaaaaagatggtatacggcgagagaagaaatgaaaatggatttgctgggagtaaaatggaaaggtaccgaatttgagaaagaatggccaagtgtttccagtcctgtcaatgcggatggatgcttaattttagaatccggacgaatttggaatgacaaacattatttatatccattgccgacagaccagttattgcttaatccgaatttgaagcagaatccaggatgggataaataaataccatgtttataataaaatagagaattatgaaacagataaatttaatctataaatatagagtcttttcgctgatagccatgatggccttatctttattgggaacatcttgtaaagacgaagacaattttgaagcattgggaagtgaaaaaataatctcagcgatagagctgaaagttacagagcggcttccgttgttggttaatacggattcattgattgcctatactgtacttcctgatgatgcaggtaataagaatctgctttggacctcagcaaataaagagattgccagtgtaaatgcagaaggacgaattaccgcccataaactaggtaaggtgtatatcactgctatgccggaagtaggatttgcggcaactaaaacaatagaagtggaagtgattgatgagattataaagattcaggatattcatgtaaaaggtgaagaccagttatctgtgtatgttaccgcttcgcttcaattagagacgagctttacacctgaagttgtaacttatactaccttgaattggattagtgaaacacccgaaatcgcaaccgtttcggaaagtggattgataaaaggaattactccggggacggcacgaatcagaatagaagcgagagacggtagccatttttcaaaggttataacggtggaggtaaaagaaatagtgccattaagagatattctttttgatgaatcgcagaaagaactggcgttgaacgaaacctctgtgctgaatataacccctgtgccggcgaatgcaacggtttcagcaatagaatggtcgagtgagaatgcgaatgtggtgagcataaataaagaaagcggagtatttacggtcaaagcttacggtacaacccgtttgatagctaagagtggagatatagagaagtctcttgaagtaactgtgattaaagggaaaattaatgatacctttttgtatggtgtaagtaattgggagaaatttggaagtgatgcggaatctgcggaaattgtgaatggaaaattgttggtcaaggcttctgcctccttgaaaaaagcatctatacacagaataccggatactgatttccatgcaggactatatcctattgtcgcaattaagatgacaaagatagaaacaacttgtcgtttgacatttgactcatggaccggtaaggatttagggggtgcttatgtcggttgtaatggtagttatgatgtttggaaacctcaaacattaatagactctgctgatggagttcctgtattctatgctaatttggccgagcataatttgggtaaggcaaaattgccaacgaatgaagctaaaacattggatgaatatctttatcgtatacagaacttgggaacgacagaaaatatatcttatgaagtttattgggtgaaatcttttaaatcggtagaagaacttaaggcatatataggtgctgaataaaatagttgaaagatatgaaacagataattttaaatttagtaataggctctttatcctttatcgggacaagttgcagtgcagaattcgagaatggtgtttctgacattgattcatgggaacctgtaagttatgaatttacaataaagcatccttgtttggtgcatacgcaggctgactttgattatgtaaaatctaaagtcgaccaacaggcccaaccctggtttgacggatggaataaattgctggaaagcgatggggcaaagctaacctggactgccaggccacaagaggaaattatcagaacctctagtggaggaaactttaatactgcagcttttgatgcggcagcagcttatcaactggctttaagatggaaaatatccggtgatgaggattatgccaaagcttccattgatattctgaataaatgggcgaaaacctgtaagggagtgaatgtaacgacagggcagactgacggccatcgtttactggcagctggttttattggatatcaatttgccaatccggcagaaattatgcgtgattatccgggatggaagaaagaagattttgagtatttcaaagaatggataaccagtgttttttatcctatctgctatcaattcctcggagaccattttaattcggcacctgaagatggttggatgagttgggatttacctgcaatgttgacaattctttctataggtgtcttgtgtgatgatgcagataagattaacttggcattgagatacttctatgaaggtgaaggtatgggatgtattgacaaatctgtagtggcgatgcatgaagatcctgccggaaaagttatcggtaaacatttagctcaaagccaggaaatgggacgcgaccaaggacattctaccttgaatgttcctctccatgcttatttttgtcaaactgcctataatataggtatagatttattttcctataaagataatatcgtgcttgatttgtgtgaatatacagccaaatataatgtgaatcccgaagaagctgttgatttaccttatacaccttattattcaggtaaagaaggatggcataatgtcgttgcggctgatggaagagggcgtgctcgtccgggatgggaacttatctataaccattatgtaaaagtaaagggaataaaagcaccctattcacaagagtttgcagagaaaatgcgtccggaaggaggtggtcacagagggacggctgaagctgatgatttaggatttggtacgctcatgtacactagagaataagaagtctatataaagtttactgaagagttttaacagaatgatgtgccaaaagttctttctatggttaaacgagcttttggcactctctcttttgttgatttaaacttatttgatttattagaaaatatgataaaaagagcatttattctttctattcttttctttttgtttggaacaaccatcgtatatagccagcagaatgaatgggagaatcctgtaaaatacgagtggaataaggaacaaccacatactgattttatgatttatgatcgttccggggatgctattaaagatgaatatgaattgtctccttggtataaatcactgaatggtaaatggaaattcatctattcacctgctattgataaaagtgaaaaacagttttatcgtatggatttatctagcgattactggtctgatattgaagtaccttccaactgggagctacaaggatttggagaacccattatccgcaatatacaatatgttttttcacctaatccaccctatgttgatgtggaaaatccggtaggaacttatcgaaagactttcactgttccgtctaactggcaaaacaaagaggtaatgcttcatttcggttccataacgggctatgcacaaatatacgtaaatgctcaaaaggtcggtatgactaaagcctccaaaaccccggctgaatttaatgtgactaactatctgaaagaaggagagaatgtactggcagtgcaagtttatcgctggcatgatggtagctatatggaagatcaggatttttggcgactgactgggattgagcgtgatgtattcttgcaagcttaccctaaactgactatttgggattttttcttaaaatcaagtttggatggcgcatataaaaatggtatattcaatgttaccgtagatttgcgtgaatttacaggcaaccatatgaaaaaaggaacactcaaactggaattattggataaaaccggcaaaacagttttgtcacaacaaaagaaatttaacgtaaaagaagagtttacccggttagctttttcgggcgtcataaagaatgtttctaaatggaatgccgaaaaaccatctctttatgattgtgtcatcacacttttggatgataaaaacaagcagcttgcagttactgcctataagacaggtttcagaaagatagaaataaagaatgcccaactattagtgaatggcgttccgacttatataaagggtgtcaaccgacatgaacataacgatagtttgggtcatactcaaactcgtgaaattatgatgaatgacctgaagctgataaagcaactgaatatgaacgccgttcgtaccagccattatcccaatcatccgttgttttataaattatgcgaccaatatggcatttacattgtagatgaagctaatattgaaacccacggaatgggatcagtgccttatttcaaagatacggtaccgcatctcgcctatcgtcccgaatggtatgcagcccatgtagaccgtatcactcgaatggtggaaagagataaaaaccatccatgtatcataggctggtcattaggaaatgaatgtggtaatggaatcgtattccatgatgaatataaacgactgaaagaatacgatccaagccgttttgtacagttcgaacaagcttgggaagattggaatacagatattgtttgtccgatgtatcctaatatgtggaaaataacggaatatgccaagtctggtaaacagcgtccgtttatcatgtgtgagtatgctcatgcccaggggaatagcaatggaaattttaaagacctttgggatgttatttatgacagtcctaatttgcaaggcggctttatctgggattttatggatcaaggatttaaaatgaagacaaaaccgagagacggacgtacctactggatgtacaatggcaaaatgggaagttataaatggttggaagataagaaaggggaactaaatacaggaaccgatggcttaatctccgctaatggtattcccaagccgcaagcgtatgaagtaaagaaagtctatcagtacattcagtttaatgcgaaagatttgagtaaaggaattatttcaattaggaaccgttatgactttaccaatttgaatgaatatgctttcacttgggaagtatataaaaacggagagaaattctctacaggaaatttcaatgttgaattaaaacctcatgcggaaaaagaggtacgattgaatcttccagtcattccagaagatggaaatgaatattttctcaatctctatgcctatacaaaggttgctaccgatttagttcctgtacattatgaagtagctaaagaacagataaaattaaataagagcagtttctttacttctcttcctgtttgttcgggtaagttgtcttatgaaacaaaagacaatgttttatcttttcagtcgggtactgtttccggtaagattgatttgaaaaaaggagtgctatttaattattgtataaacggtaaacaacctattaggcaatacccggaacctgctttttggcgtgctccggttgacaatgatttcgggaataaaatgcccggcttggcaggtgtctggcggacagcacatattaaccgttatgtgaagagcgtggttatagaggaaaagaacgaaaaaggattgtccataaaggttgattggatattgagtgatattcaggttccttatacaatggaatatttgatacgcaataatggttctattatcgtgacaggaagtattgacttgacaggaacgagacttcccgaacttccccgcttcggtatgcggatggaattgcaacaatcctatgagaatctgacatattacggcagagggcctttggaaaactacatcgaccgttattcaagttcgtttatcggacgatatgaggataaagtcgaaaatcagttctattggtatatacgtccacaggaaaccggaaataaaacagatgttcgttggctggctttattgaatagtgaaggagagggagtgaaaattacaggtctgcaacctatcgcattttccgctctgcatttctcaccggaagaccttgatcccggtttgacccgtaaattacagcataccattgatattgttccgcaaaagaatattttcctgcatgttgatttaaagcaacgcggattaggaggcgataatagttgggggatgtatccgtacaataaatatcgtttgcttgataaaaaatatgtttatagctatatgattgaattggctgaaaagggttcagattaaggctattgtttgaataggtggtagataaaattttcaatagcattgagtaaaaaaaatctccccttcgtatttgttttacatagacaacaaatacgaaggggcgaattttttaagaaaaggaatgtgctcttttggagaattttatgtaagtttgtcacatgtttaatatgaaaaagctcattgtaggtgagaaacacggttaaatatctgatttttctaataatatatttggcatgtgggggtaatctgcaagcccagaactatacattccgtaatgtcgtcatgtccgacggtctttccggactgttagtcaatactatttataaagattccgaaggttttgtgtggttagggacagataattgtctcgaccgttttgatggagtgaaagtacgccattttgaatttcggggtattgaatcaggaagaaagaaacgggtaaacagcgttacagaaacagccagcaaacaactgtgggtaggaaatggaatcggactttggcgattgaaccgtacaaacagtcaattggaaagaattgtccccgaaaagattgattttgctgtaaatactttgttggctaatgaggatgttctttatatcggcacagagaaaggcttgttcattcataaagacggccaattactacaggttttgacagaccggaatatgcttgccgcctgtaacagaatcatggatatttgtctgaatgaagataaaaccgtattatggctggctacggtgcaggggctgttctcttattcgctgaaagatggaaagattgattcctggcattttcaggagaatgtgcccgaagccgattatttccgttgcctgacccgtattggagaaacgctttacctaggcacaatgagccaaggtgtagtacgttttgatataaaaaaggaaacattctctcatacggtatctttaggctgcgatgtcatttctgatatatccagcgatgggaaagagactgtttatatagctactgacggtaatggcgtccacttcctttcacacaaagaccaacaagtgacacgtcgtttttaccatgatgtcaatgataaggaaggaattcgtagtaattctatttattccttacttgtagatgatagaggtgccgtctgggtgggccattttcaggcagggctggattattcactctatcagaacggccttttccgtacatatgcctatccacctttattcaattcggcaaatctttccattcgttctttcgtaaacagagggcaagagaaagttatcggttcacgtgacggtttgttttatataaacgaagctaccggagtagtgaaaagttttgtaaagcccgttttgacttcagatctgatactgacaatcagcttctatcaaggagaatattatatcggtacgtatggtggcggtatgatggtactgaatccgggaacattatctctgaaatattttgcacagggcgatacggagctttttcaaaagggacatatattctgtgtgaaaccggatgcaaaaggaaatctttggatagggacttcacaaggactcttctgttataacggacagaccaaacagatcaaacactttactagtgctaactcccaactgccggagggcaatgtgtatgaagtaagttttgattctacaggcaaaggatggattgctaccgaaaccggtatgtgtatttatgatccggcttctcaaagtttacgctctaatgtgtttccggagggattcgttcatcgggataaagtgcgtactatctacgaagatgctggacacaatctctattttatccgtgagaaagggagcttgtttacatctactttaacgatggaccgtttccagaaccgctctatcttttctactcttccggacaattcgctaatgtctgttgtagaagataaccaaggctggttgtgggtagcttgcaatgacgggctattgcgtatcaaagaagagggagaggaatatgatgctttcacttttaatgatggagtgccgggacctacttttacaaatggagctgcttataaagatgaaaaaggactattgtggtttggtaacaccaaaggactgatttatgtcgatccgaaacgtgtggacgaagtgcgtggcaaggtccgtccgatcgtatttactgacatattagctaatggtgtaccttttaccagctcctctttgaaatacaatcagaataatttgactttctgtttcacagactttgcttatggtctcccatctgccttactatatgaatatcgactggaaggagtagacaaggactggaaattattggcagcacagaacgaggtttcttattatggactttcttccgggacttatactttccgtgtacgtcttccgggaaatgagcaatccgaagctagctgtcaagtgacagtatgccctatgataccttggtggggatggggactttccgttttattaatcgtaggaattatagcctttatacggtattatgtctggaaacgtatgcgtcgtttactagattcttctgcttcgtcgatttcagcatcagcaggggaggagatacaacagagagagcaatctgtagaacagccggaagtaatttcagagcaacaatcttccactgttgaagagaaatataagaccaatagactgaccgaagaggagtgtaaagaacttcataagaaactgatggcttatgtagagaaagaaaagccatatatcaatcccgatttaaaaatgggggacttggcttctgcattggatacttcttcacattcattatcgtatcttttgaaccagtatcttaatcagtcttactatgactttatcaacgaataccgcgttacccaattcaaaaagatggtagcggatagccaatattcccgctatactttgactgcactggcagaactttgtggttttagttcacgtgcttctttcttccgttcatttaaaaagagtacgggagttactccgaatgagtacatccgtagtataggcggaacagccaaagaagagtaacttttcgacttattatctcgaaatctatttattcccttcacccttcacttctccctgttcattggggatagagggtgaaccttgccctttcaccttgtgaatcctttcttatattcttttcctttcttcaatctgttattagataagttcttcttctcccaatctaaagctccttttccttaattgcaaagttgtttttcataggaagcaatctttaaatgcaagttttgtttttataatcaaagctttcatttctaaaaacaaagcttgcaattttataatcaaagcctgcgtttatagtttatcattaactgaaagcaactttgcaacaaggacgaaacaagtttatcattaatgaaaaggaacttatctcttaatgtcctgcatcatcattagcctgaatgtaagatgaaggaaaggtcaaaatggtgaagaaagggattgaagaggtgaagggggaaagcaaatgggtataaggagagcgaaaatgcatttttttttagtaaatagagtatcaaattataaaatgagactctgtttgttatgaatgtaacttgttgatatttagtaatatatatgcaaataagtctatctggattcttggagattactctgtcctgttttctggctgtaatatccgagatcacctctatatttgcattgtgatcaaaaaccgaaaaagatagtattatggagacaatagctaacacttacgacgacattatcacccgttcttatgaagaatattatcaggtgattcttacctatattacttatcgtatcactcatcgctatgaagcggaggatctaacccaagatgtatttgtacgtctgctggactacaaacaaatgctccgtccagacactgtgaaatatttcctgttcactattgcccgcaatattgtaatcgactatatccgtcgttattataagaagcaggaaatagatagctacatctatgatactatgtctacttctaccaatgaaacagaagaaaaaattatcggtgatgatttaatgacaatggaacggactcgtctggctgccatgcccgaacaacgtcggttaatttatacattaaaccgtttcgaaaataaaacttctccggaaatcgctaatgaattgaatctaagttgtagaacggtagaaaaccacttattccttggacgccgtgaaatgcgcgagtttttccgaaattgtatataatcttattcattaataaataaccctttgtgcttatggaaaaggagtcagaatttacaaagaggcacttgtatgccttaccttattttagagaacaaaaatttaatactatttttaaacctcaaatttaattttatgaaacgaagaggattaatatttaattcgcgacctaacaagacagctatgtttgcgttaggattaatgttgggactttgtcctgtttcaaaggcatgggctgatataaacatgaacgatagtcaagtagtggcacaggctcaaaagaaagtaaaaggtcaagtcgttgatgcaacaggcgaaccattgattggtgtgaatattactgtaataggcggaacagaaggaacgattacagatatcgacggaaattatacaattggtgtatccgctggagccaagttgaaattcagctatatcggttataaagatcagatcatagatgtagtttcgcaaactgtgataaatgtaaagttgcaagaagatagcgaagtattagatgaagttgtagtagtgggatatggttcacagaagaaggaaacattgacaggtgctgtaacggtggtatctgataaaatgttgaagaataaaggaacgatgtcaagtccgttacaggcaatgcaaggtcaggttccgggtgtgacgattactcgtaattcagctgctccgggagatgaaagctggggcttgaaattgcgtggttctgtttctgcaaataatgcggagccgttgattgttattgacggagttgcttatgatggcgtaaatgcattgcgtaatatcaacccttccgatatacagtctatcaactttttgaaagatgcatcggcagctatttatggttcccgcgccgcaggtggtgtggtgttggtaaccaccaaacaggcaaaggaaggaaaagcgagaatagagtatagcggttcatacacttataagatggtgggattgcagccggaactgatgacgatgaacgaatgggcgaatgctgtgttgcagacttgtcagaatgacggccagccggattcttattcatgggtgaaatatgcgaaaatggcattggccagtgaaggtaaatacattgatttggatcacagcgcaaatccttttgctcctagctattcagatgtaatggatttcgtgtttatggataccaactggcaagatgtgttgttcggcaattcttattctacgcaacatgacctggctgtttccggaggtacggaaaagaacttatatcgcttgtctgtagggtatatgtatgatgacagtaatttgaagtggggaaataataataatcagcgtttcaatcttcgtttgactaataagctgaaggtttttgataactttgctattgaatcagtgattgcctacaaccgtcaggatcagatagctccctcacaactgaataaaacgttgacatccagttacccgcaaccgggacttccggcttctacgatggatggaaaaccttattcatggggaacttggttgtcaccgatctggtttgccgagcttggtggggataatcaattgaaagtatctgaaattaatatcagtgaaaaatttacttacaatatcaataaacatctggatgtagtagcaaatctcggttataactccggagtagcttcacgtgatataaagaagatggccattacctcttataattatgcagggactaagataaacaccaaggccgacggctataagcaggaagaatcgtcatacgagaaaacaagttcacgtacagacttttattctatggcaggttatgttgattatcacaatacatttgcacagcaccataatgtaagtgcaatgcttggtgctcaatatgaattgaaagaatatgattattttggtgtatcggtgaaagatatacagaactctttggaaactgtaaatggtgcaggacttgtgaatctgacagacaaacatggtacgaagtggcatgaagctgtgatgtcctactattctcgtttaaactataattataagtcaaaatacttattggaagtaaatatgcgttatgatggttcttccaaattcaaaccggagaatcgttgggacttcttttatggaatatccggtggatggcgtattacggaagaagcatttatgaagaatatcaaatggctgaacgatttgaaaatccgcctttcttatggtgaagtaggtaaccaaagtggtattgatcgttacgatggtacgcagttttataaatttgaatctcaaagcggagcttacatcggtcctaacaaaggtactatcatagatacgaatggtaaaattgcttctctggggcgtgaatgggagcgcattaaaaattataacttaggattggatttctctttgtttaattcccgtctgacaggtactgctgaagtatacatgaaacgtaatgataatatgttgattaacgtttcttatccgggagttctgggtgataacgcaggtatgtctaataatggaaaattcagatcacatggatgggaaattatggtaaactggtctgataagattggaaaagacttcacttatcatgtaggaggtacttattctttcaataccaacaaactgacagatattggtgcagtatcagtcctgaaatccggtttcgttgataagcagcaaggctatccgttgaatagtatttttggtctgcgttatgccggtaaagcacagacagaagaagaacgtcaaaaatatctatatcgtttcctgacaggtaataccatcggactgacagaacaaaacttccgtttgggagataatatgtatgctgatgtaaataatgacggtaaactggatcagaatgatattgtttatctgggtacagatgatccgaaaatctccttctcttttaatttaggagcagaatggaagggatttgatttatcattagttttccagggtgctgctaaacgtactattttccgtacgggagataataacggtaatgagatttggcgtataccgatgaaggcattatatctgaatacctctaatcaatcggtaggtaacacgtggagtccggaaaatcggggtgcttattatccgacatatagtaataaggatgaaatcaatgactacaactatcaggcttcttcctggtcagtggaagatggttcttacattcgtctgaagaatgtgacattaggatacaatgtacctgctgcctttttagctaaaacgaaagcaataagttcttgtcgtgtatatgtggcaggtgctgatctttgggaatattctaagattaacgatggatgggacccggaggctagccgtaaggtatcagcggcaggacgttttccctttgtccgtactgtgacttttggattaaatctaactttttaatgtatgaagaatatgaaactatataagaaagcttttttgattttatcgtttggcctgacactgaattcgtgtttggatcttgatccgcaggaccaactggcagatggcaacttatggggggcagcagatgattttaagtattttgcaactaatttctatggttggacccgtgatttcacatcggtaatttctgatggtgcacattctgactggcgttcggacttgatgacttccagttctgtaaatatgtacagcaatggtagtaatccgatacctacttcagacggtaactataccagcaattatgcccatatccgccgttgtaatttgttgctgcaaaaagcagcgtctttttccggtaacggtgacattagtcgctatgtagcagaagcgaagtttttccgtgcttattcttattttgatttggtacaattattcggagatgtgattattactaaagaaccactggatattacttctcccgaattgcgcatgagccgtgacgatcgtagcgaagtgatcgatttcgtcattcaagatttacgggaagcggctgaagtattgccagagacaattacaacggatgatgaaggacgtatttcgaagtggggggcttatgcatttctttcgcgtgttgctttatatgagggtacatggcaacaaaaccgtaataatgaagaacgtggcaaagcattgttgagtattgcagcggatgcagcgaagaaggttattgatagcaagcagttcgaactattcaaacctgcagcgctgggagagatggcttataaatacctgttcattttggaaaatgtacagtctaatcctgcgaatctgactaagagtgctaataaagaatatatattctatcgccgtcatgatgaaacgattgctccgatcgggactaatatcactcatggctgtgtggctaacgtgcaatatattaatcgcaaatttgtgaatatgtacctttgtagcaacggattgcctattgaccatgccaagagtgccgatgtctttaaaggttatggaggactaaccacagaatttgaaaatcgtgataaccgtatgaagaactgccttctggctcatggtactaaatattgggataatgacaaacctcgtatcgattggaaaggtatggatggagaggatgccactaatgccattacatgtaatgtattccaaggttccggttatcagaataagaaatggggtacggaacgtaaagttgccgatacatttgaaggatatgacttcccgatcatccgttatgcagaggttttattgaattatgcagaggctatgtatgagttgggaactactggtaaggctttggatgatgcattgaatatctcgttaaatttggttcgcctgcgtgtaaatccggatatgcccaaactgactacttcttttgtttcggaaaacaatttgaatatgagggaagagatccgtcgtgaacgtaccatcgaattgtacaatgaaggtttccgtattgatgatttgaaacgttggaatactgctattgtagagatgcctaaaccgattttaggtgtgaaatggacaggaacagattttgcgacttcatgggctggtgcttctaatatggcaaaagattcggatggctgtttgattttggaaaatagtcggcgttggggtagcaaaaatgatctgtatccgcttccggtagatcagtgtcagttgaatccgaacttgggacagaatccaggatggcaataaacgagtctgaaataacttaaagaataagaatcatgaaaagagattatataaaatattttgttgggctggcggcttgttcgtttttaggtctgacttcatgtgatgatgataaggatttaggaggacagatggatgagatgattaccatatccaccattactctgaacgaaactcaatatgatgcaggaaataaagcaatttgtttgctgaagaataaggaactgcaactctcttggagtattgcacccgaaagtgcaaccaatgcgaatgtgcaatggacttcgtcggatgaatctattgtgtctgttacacgggaaggtaaggtcgtaactaaggataaaacaggaaaggctgttattactttaatgccggaaatcggtttcggaccggaagctactatcgtgactagaacagtggaggtcatggaagaatatacatatatgtcatctattaacattaaaaatgttccagcggaagaaatcgcagcaggggatgaatatcagttggaagttatatcggaaccgtcggatgctacatttaaacggtataagtggataagtagtaatccggaagtagcaactgtagatgaaaaaacgggattggtgaccggaattagtaaaggtgatgcaactattacggtgactgccgatgattttagttcgactccagtgtctgcaagttgcaagataggagtgaaaatagttactccaattaccggaatgacatttactgaagataaggaactcaatcagttaggatacggtcaggaatatcagattaaatatacattggaacctgtagatgctactgcatcgttactgacttggacaagtgacaatccggatatgataagtgtagataaaacaggtaagttgaaagtacataccacgaagaccgcttccgctgttataaccgcttcttatggccctgttgtacaaaatgtaaccgtaacagttgccgatggacgtttctggtattcattaggtaatggtctgggtaatgggcaggataataattggtatctggatggtaacggcgcgtctgtagtttcatctgacggaaagaagaccattgtccaaatgggttccggatatcgtggtgatttatggcttgcaagaagtggtaaaggaaaggttgtaaatgtgactcctgctgattatagatatttcgcaattaaagtaggattcaaatcgcagctggttccgggaaagaataaacctaatggttgtattaagttagagatatttgatgatggcattaagaagataggacctgaatattttggaacaggtggagatgcaaataatagatatgaaattctgggggcaagtgagatttcgactacagaaccgaatgttttgtactacgacttacagtcaaaatataagactgtgacacctacagactggaatcaggtatttgatttagcgcaatgtaaatttgttattgctgactttccggaaacagcacagacttatgatctttactggattcgttctttcaagtccatagaggaacttcaagcttttgtagacagtgaaaacaatactaacgaataactatcatgaataagatgaaattacatacaataataggagcagggcttttcgccctgacttctaccacgcttttagcatgtagtgagatagaagacggctctaatgatatgagcagttggccggaagtgaaagattatgttacgactttggagcatccctgtatgcttcatacggaaacggattttgaatttgtaaaaggaaaggtacaagccggcgcacaaccttggaggagtgcgttcgatcatttgagccgcggtgggaatagcttgtctcaatcgaactataaggcttctcctgtgaaattgttagcacgtctcgatcaaaacaattgggcaggcaaatatcccaatgattggaataactatacgaagttgatgaaggatgccgccgcagcctatcaattagctcttcggtggaaattgtcggaaacagatggtgcacagtatgcggatgcggctgttgctattctgaatgattgggctaaaacttgtacaggatttatcgtgaatgataaaggtgaatttatagatccgaatgagttcttgatttttattcaggtgcatcaattggctaatgctgcggaaattatgcgttcttattcaggatggcaggaagctgatttcgttaagtttaaagcatggattacggatgtcttttatcctcatatcacaaaattcctgtctacacacaacggaaatgaatgtgcacttcattattggctaaactgggatttgtccgcaatgactgctttgctttctatcggtatcctggcggatgataactttaaaattaatgaggctattcaatatttcaaattcggtattggttccggaaatataggaaatggcgttccttttatacatctggatccggatagtaatgaaatgctgggacaatgtcaggaatcaggccgtgaccagggacatgctaccttgtgtgtcagtctgctgggtaccttttgtcagatggcaaagaatgtaggtgaagaccttttcatatttgatgatggacgtgcattggctatgtgtgaatatgtagctaaatataatatcggtggtgccgaaaccggtagttcaagtgccagttggaagatgacgagttttaaatatacagataatgatctgccttacactacttatacaaattgtagtggaagctgggataccatttctgcacaggaaagaagagaaggaaaagactcacgtggtgaagtgcgtcctgcatgggagttggtgaatcgtttggcacaggattacggtaaatcaagcatctatgctaagatgtgggttgataaaatgcgtgaaaatgcatcacgcggaaattccgatggcggagcaggtgattatggacctaatagcggtggttatgaccaattaggtttcggaacgctgatgtttgcaaaagagtaaagaaaacgctgttagtaatatagcatgattgttttacaataattttggataaatagaaaaaagttgtaaggggattaggtatttacctaatccccttcgtatatataagcaaataggttaagaaatagattgtttgaaatcagagattggattcagtttttgaagtgattagtttttgtaaaggtagaaagaacctgtttttaggaataacgaatcttattttgaatgaaattgattattaaggtatatgcgtaaaaagattctgtttttagcaggaatgatggcttgctgttcattggcaggtgcacaagaaatctctaagacctgggtggctgataaggggaatggaacttatcagaacccggttcttcatgcagactattcggatccggatgtatgtgcagccggagatgatttctatatgacagcgtccagttttaattgtattcccggaattcctattcttcattctaatgatttggtgaattggtcgttagtaaactatgctttaccgattcaggagccggaagaattcttcgataaggcacagcatggtaaaggcgtatgggcaccggctattcgttttcataacggagagttctacatttactggggtgatccggattatggaatctatatgattaaagccaaagacccgaaaggaagatggagcaagcctgtattagtgaaagccgggaaaggaatgattgacccgacaccactttgggatgaagatggaaaagtttatcttgtacatgcatatgctggtagtcgtagcggagtgaatagcatcgtagttatttgcgaactgaatgctgagggaacagaagtaatttccgatccggtgatggtatttgatggaaatgatggaaagaaccatacggtagaaggaccgaagctctacaaacgcaacggatactactatatttttgctccggcaggtggagtagcaaccggttggcaattagtacttcgctcgaagaacatttacggcccttacgaatcgaagatcgtaatggcacaaggaaagacaaatatcaacgggcctcatcaaggtggctgggtagataccaacacaggagaatcctggttcgttcattttcaagataaaggagcttacggacgcgtgattcatctgaatccgatgacttgggtaaatgattggcctgtaatcggagtagataaggatgaagatggttgcggtgaaccggtaacgacctataagaaaccgaatgtaggaaagacatatccgatagccactccgccggagagtgatgaattcaatacccgtcatttagggttacaatggcaatggcatgccaataaaaaagacacttacgggttcacgaccgacttggggtatattcgtctttatgcaggcagtctctcaaaagaatttgtgaacttctgggaagttcctaacttgttgatgcaaaagtttccggctgaagagtttacggctacaaccaaattgacatttactgccaagcaggatggggaacaaaccggaatcattgtaatgggatgggattatagctatctctccattcgtaaggagggagatcagtttattctgcaacaagcagtctgcaaggatgcggaacagcaaaatcccgaacagataaaagaattggcaaacattccggtggaacatctgaagatgccgggagtagcagataatgagtggcaaacagtttatttgcaagtaaaggttcgtaaaggagccgtttgtacattcgcttatagtctggatggaaagaaatacacgacagtgggagagcctttcacagcccgacaaggcaaatggattggagccaaagttggagtattttgcgtaactccgaatgagggcaatcgtggatgggcagatgtagactggttccggatgactaagtaactgatggagtgactaagtaactgaccgctcaagtaactgacaaagagaaataaagattaagaattaacgcgaatatatttgaactaagatgaaaaagattgtagtaggtctggctgtgatgttaggtttttgtatgtgcactcacaagccttccggtacattggatgtgaatagggcattagactactgtgcagagcagacacaacgtacgcttacggaactgaaaacagattccggcattgactatacgatgatgccacgtaacattatggctgacgaacaccactggaactgtcgtaaggcaacgaaagaagaatggtgtgccggtttctggccgggtgtgctctggtatgattacgaatatacacaggataagcatattctggaagaagcgaagaagtttacgaactcattggagttcctttctcaaataccagcttatgaccatgatttgggattcctcgtattctgcagttatggaaacggctatcgcttgacgaaagatcctgcttataagaaagtgattctggatacggccgattcgctggctactttattcaatccggttgtaggaacaatgctttcgtggcctcgtgaagtggaaccacgcaactggcctcacaacacaatcatggataacatgattaatctcgaaatgcttttctgggcagcaaagaatggtggaaatccttatttgtatgatgttgccgtttctcatgctgataaaacaatgaaatgtcagttccgtcccgattatacatcctaccatgtagcagtctatgataccatcactggtaatctgataaaaggagtaacccatcagggctatgcagacagtaccatgtgggcgcgtggtcaagcatgggcaatctacggatatactgtagtctatcgggagacgaaagatcctaaatatcttgatttcgcacagaaagtgacagatgtttatctcgaacgtctgccggaagataaggttccttattgggatttcagtgccccgggaataccggatgctccgcgtgacgcttcggctgcggcagtagtggcctctgctttgcttgaactatctacttacctcccgaatggaaccggaaaacgttataaagatgcagctattgaaatgctggcaagcctgaactctgacagttatcagagtggcaagagcaaaccgtcctttctgcttcatagcgtaggacattggccggctcattcagagatagatgcctctattatttatgcagattattactacattgaagcattgcttcggttgaaacgtctgcaagaaggaaagaatgtaattaaataaagaagatttatatcgaataaaacactatctttatcacagttatttaacaataaatctatgttgtatgaaacagtgcattaaaacaaatggagttttattctttttttgtttgatatcattaatcattactgcacaggagcaatcagtgcagtctaatatcaaatgcttgaattatcctagttcgtttgagttattgcttcggcattttaaaggaaaaattgtatatattgatgtaatggcatcttggtgtaaaccctgtctggcagaactcaaagaatatgaaaaaacagatgattttttcaaaaagaatgatattgtaagactttttatttcaatagatgaacccaaggattggaatgcctgtttgaaaagattggatgaaagattattaaatgggtattttgtcacctatcatcgaccagagaatagtgttgagaataataaattttctgttgaagtggagaagttgtttgtcacttatgatgagaaaggtaatttcgccgggctttcagttcctcagtttattattgttaatagggagggaactattgtagaatataaggcacaaagaccaagcaatccggaggaattgaagaatcagttgaaacaatacttggaataatatgaggaaagactcccaaaaacgaaaagctctgcaagaacgaaggttccgtgcagagctttttttactggttagggttaggtttattttattgttttaccttgatgatgtcataattcagatcgctgacagcttcttgcaagctatcgttcaccagacgaagagtggtgtcatttacaatcacgaaatacatcggagcttcaccatccttcggagttaacttaacagcagtcacaggttttttgttcactaccttgtgtacagtctgctgttttccttttgaagtgaaagtcttgttttgtccttgaccttcagcatcgaggtaagtcatatccagtgtatacgcagtatctacaccgtcagttgcagcgttcaaggttagtacatagtcaatacccggaccgtcggcagcaggaagagtaccttcataaacttcagttagttcggtaatcggagtcatagcaagagctagactgtctgcttgagcctctgcggctttgtttgcttttgattggcatgatgccaaagcagctacgactgctgctaacataattacttttttcatcgttaagtgctttaagttaatataaatatagtgagctattgctcgttttttgctatcctattcctgctcttcgtcccgtttgatgacaagcagtttgtctactcgtccgcggtccatgtccaccacttcgaattgcagattcttgtaggtgaagatgtctcccgctttcgggatacggccaatcaggaacatggctaatccccccagagtggtgaagtcttccgattccagatcttcataggataaaatacccatttcctccatgaagtcgtcgatgttcattgaagcttccaccagcatcgaaccatcctgccttgtgacgatttcttcttcttccgtttcatcctcttcaaggatgtctccgaagatactttcggtcaggtcgtgcagtgtgataatgccttctgtgctgccatactcgttaacaacaactccgaacttgtttttgttcttcttaaatagctctaaaactttatttgcatataaactttccggaataaagaggggagggcgggctatttcgcgtaagttaaacagctttttactgcctatcatcaggataatatcctttacggaaaccacaccgataatctcatctttccgttcgtccaccaacagatatttgctataatgttcttcttcgattgtcttcatcaccttttcctgcgtatcatcagggtgaaggataatgagatctctgcgatgcgtcatcagttcgttagcccgtttgtcggagaagcggaacacatcacgtatcatttccgtttcctctttgtcaatcacaccctgttccgaactttgatggagaatcattttgatttcctcctgcgtcatggggcgttcttcgcttttcaaaccgatgagtttattcagtagccgggtagagacactcagcaaccatacaaaaggataagaaacctttgtcagcagaatcatgaccgggctgaacaaagtggcgtatcgctccggattactaagagcgatagatttgggtactagctctccgataatcagagaaagataggtaatgattgctacggtagtaatcattgccaggttgcgtgcataagcttctgcgcccggaatgagggaaaagaaaggaacgagatcgtcggcaatagccacaccaccatacgcaccggatacgataccgatcagcgtaataccgatctgaatggtagataagaacttttccggttcttccaattgttttaaaactccacgggctgatttgttaccttttgcgacaagtgtttcaagacgtgctttgctggatgataccagcgcaatttcatacatggcaaaaatgccattcagtacaagtaagagaagtatgataagaaattccataaatggattaaaatggttatagggtcgaaattacaagaaatcaggacactatgcaaatctatgttatagattaatgattttttaataatagtgtgtccttttttatcaaaaacagaggaggagatactgcggttgacaaaccaatgtatctcctcctttatttgatttaggaacgatgtccgttattatttagcgtaagttgctgcttttgctttcgcacgttcgatacgtttcatggtatccgggtgtgacgagaacatcttttgcaggtaagaagcttgtggagcatctttcgacagttcggacagcttagtcagtgagttagccattgcatacggatcgataccgttctttacacagaactctactccgtaatcatccgcttcactttcctgcttctgtgaatattgtgcgcctgccagggcttcagccatagctcccagctcggagtcggtcagtttggctactttatcgctgctggcacctgctgcattcttcacggctgaacggagataagcattcttcatggcatctttagagtctgtgtgaactacgtgaccaatctcatgtcctaccactgccatcacttcttcatccgtcatcacatccatcagaccggcgcaaatacgtacactaccgtcgccacaagcgaaagcatttacgtctaccacttcatatacgccaaagttaagtttcagtccatccacttctttgatatgtcccgtcaacttctccagacgtttgccatattcagtatcaggtttggtcaatggattatgagcatccatccataccatatactccttgctcatgttggcgatgtccgcatcagataaagtaacggctgatactacgtctttaccagcttgtaatgctttccctaaattaaccttcttgccaaattgtgcggaagctgtcatacccatgcctaacaatatgaaggcaatcatagcaatttctcttttcatactctttttctagtttaatgttttatgtataaattaatactcaaatgttattcctaatgtggggagcaatgtcccgctcgattgtttgaggcgtttcattttatagtgttgactgtcggcaggagcttccggattttcaatgataccggtgctcatcaatacatcctgctgtttcagtttgcttaccgtgatattttgcaaatcaagatagaatcccagcatacaatgtttcagataaaatgtcttgtcgatacggaggtctacctgtgcaaaggccggaagacgttctttattatatttagaatagtcgtaatatgctttaccttgtgcatcccaggcagataccagagatgatttttcttcgtcataaggtgtataaggagcaccgccgatgcaactgactttcatcccgacactccattggcgcggtagattgtaggttccccgtaagttgaaaatataccggttgtcccatgcggatgcaatgtattcactctctttgtcgttgcggtattcacttttaaagatggtaaaggaagaagccagattcagtttcttggcgatcagccactttactagaatttccgcaccatacgaacgtccttgagcagtagaagtcagcaattcattgccaatcactccatagtcatttcctttgcaggtaagaggaatcccgtctacaacggagagcggaattttatcatagtctttatagaatccttcgacagagacttcgaaagtatctcctttgcgccaactgatacccagactttcctggctgactttcatatagcggagattgtatttgttgacatacgttccgttattatccttaaaaccgagagccgtgtaaggaggcaactggtaataaagtcctgcatttccgcttacgaaccagtgtttggcaagttgataggaaagcgatatgcgcggtgaaagctggtcggagagtgatttcatcgctgatgaataattgttggcatccgctctcaatcctagagaagctgtgaagcgttcgtccatcgaagagtagctgatagtgccgaaaagtccccaacgcatcatccccaaataggtatggtaatcaaacgtttgtgcctgattggtatacgccttttgaaaggtggtattggtatattgactataatcaaggttcactccgagattgattttccagttgcggaaagaagaattgttttcgaaacggaactttgtctcttgttcggtagaacggaggcggagcatcagattctccggaatgctttcatcattctgccggtatttggtattgcggttgttcagataactgtggctgactaccaccgattgcacatgcggacctgcataatgacgatatacagcacctagggtaaacgtttcctgcttgattttcggcaggtaactaaggatatattcattgtcctcgctatccgctttcgtattcagtcgcatattatcgatccctccaagtcccaataccgtcagctcgttttgttcgttaaaccgggttttcaacttgaattgtgcatcggtgaaggttggaaggaaagggaggtcgagcatatcaaacagaaattgcagataagattgacgcacggataccagataagaggtctttttcccgatatgcccgttggaggcgagcgacacttcggatgctccgagggtagcctttacagagttatgctccatatctccgtcgcgcaacttgaaatcaagaacggaactaagtgcgtttcctctatcagtggggaaagcaccagtgtagaaattgacttcacgtatcaggtcggcattaaggattcccaccggaccgccggatgctccttgcgtactgaagtgattgatattgggtatttccactccgtccagataaaaacggttttcagaaggagaaccaccgcgcacaatcaagtcgttgcggtagccgataggcgagaaggcaactcccggataagactgaacaatacgtgaaatgtcccgattagctcccggacttttttctatttcctgcaatccgatgatgcgcaggctgaccggactttccagatcgcgccggaaaggagaagcggtgacggttactcctgcgagttcggtcaggttctcttccatctctatcgagatgttcagatctttggtagatacaatatattcgggagtagtgacactcttgtagccgatggctgtcgcttgcaggcggtagatgccgggaggcacttgttcgatggtgaaatggccttccgcattggtgacgccaccttcgttcagcccgagaaccattacgttaatgaattctaatggctgacggctgtttttctcaataaccgttcccctgatttgatgtacaggttgtgcctgtagcagggaaagcagaaggtttgaaaatagtagcagtgtcaacagtcttttcatgtgattgcgaattattgctgcgaaagtacgaaaaaagtattaaagaatgataccttccgtaaataaaaacagaatcacttcctgtttggttcgttttacctactgataaagttagccggattttgtttcacatttcatttttatatcttatttttgtgggacatattaaaacagattccttatgaagactgtaaaattgataacttgtaatgatgcgatgaaggcacacatccttcagggagcgttggagaatgaaggcattgagtctattctgcacaatgagaatttctctactttgtataagagttgtgtgagcaatatagcaggagtggatatattggtggcggatgaggactatgaaaatgctgtccaagtgttgagggataacgatagttggccggaagagttgacgctttgtccgtattgcggttcatcggacattcagttggttctaagaaaaggaaagcggtggcgcgctttgggtgccgctatcatttctgcattgatggtcactcctccgggagataaccactggaactatacctgtaaacagtgtcataaaacctttgaaatgccggtttctaaatttaatccttctgcagagacagaggaataattatatctaactattataacacacaatgaaaaagaaaaaactcttattaattgctcttcttttagtatgggtggctccgtcttttgctgccaaagtagataccttattaattaaaagtccttccatgaataaggatgtgcaagtggtggtggtaacgccggatgctgcgttgggaaagaaagctgttgcttgtcccaccatttatttattgcacggttacggtggaaatgctaaaacatggattgacataaaaccgaatcttcctcaaattgcagacgagaaaggaatcatattcgtttgtccggacggaaagaatagttggtattgggatagcccaatcaatccgtctttccgctatgagacctttatttcatcggaattggtgaaatatatcgacgaacattacaagacgattgccgaccgcaagggacgtgccatcaccggattgagtatgggtggacacggagcaatgtggaatgcgatccgtcataaagatacgtttggtgccggtggaagtacgagtggaggaatggatattcgcccgttcccgaagaactgggatatgtccaagcagttgggagaatatgaatcaaataaagaggtatgggataatcacaccgttatcaatcagattgataagatagagaatggtgatttggctatcattgtcgattgtggagaaggagatttcttcctgaatgtgaacaaggatttgcataaccgtctactggaaagaaagatcgatcatgattttattactcgtccgggagcacataatggacagtattggaataactccattgattatcagattctgttctttgataagtttttcaagaaataaatccggaaatacttgactttggcttttcaatgtcgtatctttggatacagaatcataaaatagattgaggttaaactgcgatagaaggaggaggcgaaagctttctccttttttgttatatgctgcggtgacggagaatctcaccccggcttgtagcggttgtaagcccgggtgtaaagacactttagctgccgggggatgggaaatcaggtgttttatctgagtaaatcatacgcttggttaagtgtaaaccgatgctttgttagatgtaaaccaacgctttgtttagtagaatcagacggtctgttttgaaaaggtggaataatgggattcttttgttaatgatgcgtaaatctgctattgacaagaagtgtggtgaaaaacgaaaagaagtgctccccaaaagttatataagaaacttttggggagcacttcttttcattctatttggttcttgctttgtttctatttaatctttagaccgccaccaccgacaaaccgcctacttgcgggactaataacacttttctcaatcttgaattgtgcttttgtagttgtatcttcttctttttccgggggataagtgccttctataacaccgatggctacttttaataatctttcatttgggtcaccgaatggcagaaactcactgtaattagtaactccatcaatggtcgtttcactgattttaagatctgttgcaggtgagatagctcctccggcatcgtgattggaatcataaacagtacatactaccgggttgactgaccacagaaattcttcattaatgaattgttctgttgctacgttttgtccttttgtgacaccaccgatggttacgacaggatagttgtctttcaggaagagacttctgattaacatttccggtgctccagctgttgtactgcttgtgatagcaaacagaccgggcaggtctaaattaacaccgctctttaatatttcactatcaaagttgatggtggcatccttgtccctgtttttattattatactccagataggccatcggcttatttaatcgtacttctgaagtcaaaattgtacctaatagctgaacgcaatccaatgaaccaccggcgttataacgtaagtcaagtataacatattttacgcctgctgtcttgaattcttgtgaaatttgtcgcagttcgttattgtacttgtccggatcactgttggtgccggctgtgaaactactgtacatgagataccctactttgattttttggccattctcttctgctggcagtactgtatacttatgtaccggattatcttcaacggatcgtgccgcaggtagttttagggttttgccgttaggtactactttgtacacatattctgtttctccttctcctccttcttccgtatcaacgtttgtttgatcttcctcttctgtcacaggaacttttttccattcacccatcaccaaatcccgggctttggttccctgtagcaattgagtctcgtatttcttgctgatgtaagaagtatcgactttcataatccagtttccacgttccaatccggccgcttctgccggtgaaccgggaatgacgtaagtaattaacgcattataagctgtatcaatatccgcacttcgaactagtgaataatcaaatccataggtaggtaggggagtttccatcacagaatccacaaacgaataactgtcgttttttgatttcactttagataagaacgaggcaggttccaaaaacagattcacatcatcgtaggaaggtagatcttgataccacagatagttctgttgcatgatgtcgtacatccatgtatccagtgcagtttgatgggcatactccggccagcggtcgacgccacaggagaagaaaccactgatagatacgaggatcagggcaggtatgaggattatctttcttaatttcgtcatcataaaaagctttttactgtgcaaatgtaggaaatactttgcttatctaccacatttatggtataaaaatgccttcaatatgtgattggctgttagagattcttgccttatctttgtagcatagaaatttttaataggtattagcttacatatagaacgttattaatagacaaatcattattcatggatatagctgcattattatcgggaggtgtcgacagttcggttgttgtacatctcctttgtgagcaaggatataagcccactcttttttatattaaaataggcatggacggagcggaatatatggactgttcggcagaggaagatattgaattatctactgctacggcacgtaagtacggtctgtctttggaggtggtggatttgcatcaggagtattgggagaatgtggcagcctatgccattgataaaatccggcagggactgacgcctaatccggatgtgatgtgtaataagcttatcaaattcggctgctttgaacagcgagtcgggaaagacttcgactttacggcaaccggtcattatgccaccaccttgcaacgcaacggtaaaacttggttgggtacagcgaaagaccctgtgaaagaccagacagactttcttgcacagattgattatctgcaagtttccaaactcatgtttcccattggaggtttgatgaaacaggaagtacgtgagattgccaataaagccggattgccgagtgccagaaggaaagatagtcagggtatctgttttctcggaaagataaactacaatgattttgtccgtcgctttttaggagaaaaggaaggggcgattattgaattggaaaccggaaagaaattgggtacacatcgcggctattggtttcacacaatcggccaacgtaaagggctcggattgagtggtggtccctggtttgtagtcaagaagggtattgaggaaaataccatctatgtatctcgtggctacggtgtggaaacacagtacggcaatgagttccggatgcatgatttccatttcattactgataatccctggaaagggcaggagaaggagatagacatcactttcaagattcgccacactcccgactttaccaaaggaaaactgatacaggaaggggagaagcaattttatattttgtcctctgaaaagctacaaggcattgctccgggacagtttggggtgatttatgatgaagaggcgaaagtttgcgtgggaagcggagaaatcatctgttaaatagtttattttgaaaggtgaggattcgataatcaggataattttcactacttttgtttcgcagaataataaataaaggaggattgcttatgacaacgatggaattgaaaagtctgaaaatggacttggtgaggaactcctgagcttgaatgatgagaaaaagctcaaatgaatgaagacttatctgaaacgtctcaaaaaagaaccggaatttattagtaaagaagaacttattgcgggaattgacgctagactgaaagaagttaaactttccatagatggcaagctgaaattaaaggatgcttttgaattgcttgatgaattataagttgaagtagaaagaagtttttttagatgtagtattccgctaaatccacaattcctgccctcatcgcatatttagtagcctcgtgcacattattcacccccaatttgcgaaagatattcttacgatggctgttgatcgtatggaaactaagatttttctctgcagcaatctctttcgtcgttttccctaatgcaatttcttttaggatattcttttctgtctgcgtcagcaaatggtcgtccatgcttgacattgccagcggagaagaagctcccgaaagcagcagattgctgacatggttgcaaatataccgttgtttgcgggtggcgcattgaatggcagtcatgatttcttcttttgagttatctttcatcactactccgaaagccatgctgctgaataatacctgacggagaaagttcaggcttagttcatcagagaatagaatccagtcggcttccttgaatctttcctgcaagacaatcaactcatccgccccggcaaaattgaacaatgtataatccagtacaatcaccgcttgcggatgcaatcgtaactgctgaatcagttcagccttactatcagcttctaaaaggagggatacttccttctgtttatttagcagaaacatcattcccgccttactgatatcctgattgtctgcaatgataaattctctcataagccatactgaataaaaaaactccgctacaaatgtacgcattttgcgcgatttgtagcggagttatgataagattcttgtatccggattaccaggaacgtcccttgaagatatttgactggtcaagcggaacgatatttccgttcaatgtcaggttgttgttgctgaagttcgggctgatactaaccgaagctgtattgtttccactgctcatattaataaatacttgagcggagatgccgataccctgaacactgaatgaacagttcacatttccttttttgtcgatattcatcttcatatccgaagaattaccatctactgtcacaccaccgattccgttaggacctgggtaaggagtgttgaaagcagtctgtacggtagctctgttgccgttcatcaggacgaagttggtgtttgaagtaacaaaagcactcataccgttgcggaagacaacctgattagcttccaatacaaattgcttgtttttcaaagcctgtacagcttgttgataggctgccatgtcctgcacctcttcttcggcacggagtttcgctctctctgcatctctttgagcttttctttctgcgcggcgtgctgctgcgttactttcttgtgcatacatcattgtgcttgcactcactaatactaatgctactaatgcaataaactttttcataacttttttttgtttaggtttaatatgttgttcgtttattgcaaaaacaaagtgtatgccagattgttcacgaacgtcgtgcaattttatatccgatggctgccacggtgatactcattaaaggactgataatgttgaaaaaacaataagggagatacacaagtgtgggtacactcaagatggtggcttgagtcattccacagctgttccacgggatcaatacggatgtaacggttactgcatcttccgtggtacggcttagtaagcaactttcataccctttcttggcataaatatcgcgaaacatatttcccgtcagaataatactgatatattgatcggcagtggtcagattaagaaacagaccggaacaaaccgtcgcactgaccacgctgactgttttcttcataaagcgcacaaagatggaagtgatacttcccaccatgccgcttgctgtcattgctccgccgaaacacatggcacatagtatcaaccaaatcgtattcatcattcctgacatgccacgtgtggcaattaaatctgtcagaacggcattatccgtgtgtaaatttgtctctccgtagatagtcatcattagtcctttaaacagtgaatcgaatccggaagcggcaattcctgaaatttcttccaacaaatccggctgaaagatcaaagcaaaaacagcagccagcagggtagacaggaacagcgtaacgatagacggcactttcttcgctatcaatatcccggttgctacgggaactatcagtagccacggagtgatatgaaacttttcattcagagctgttgccacttctgcgatgtgttgtgtattgttggcatcatgagagaatcctgctacggtgaaaataattagcgtaatgacaagagatggaaccgtagtaatcatcatataacggatgtgacggaacaagggagtgtctgtgatagaagaggccaggatggtggtttcggataaaggagatattttatctccgaagtatgctcctgaaataatggctccggcaatccaaccgtcttcaaaaccttgcgcctttccgatacccatcagggcgataccgatggtagcaatggtagtccacgaacttccggtcataacggaaatcaatgcgcagatgatgcaggtagatgccaggaagaaactgggatggataatttgcatcccgtagtagattagcgtaggcactactccactaatcatccagatcccgctcaacgcaccgattatcaatagaataataatggctgttgccactccggcaatattgttggtgatggcgagctcataatctttccagggaattttatagaacaccataccgataaggatacaaatagctgtagtggtgagtagtgacacttggcttccgccgcttagggcatcactgccaaatgtgcggatagtggcaaacaataataacaccagtacaatgatcggtatcaatgatacaatgggagagggggctttcttcatgttgattcttataaccttttatttgttttccggctactgttttgtttatagccgcgcaaagatacaacaaaaaagaatgaaatcttttgcttcaaaacgtcaggcaataaaaattattataagtttgtatttgattggaatatgtataagaccggctcaattagcgaaagtcttacgccttatccaccagtaacggatgaaaagtacccctgtcaggatgagggcaatggataatccggtatagaaaacagaaatgaacgtttcgggcagaagatggaagctacgtatggtaattcccagagaaatcatgaagatcattgtaatccaacttttcacatcgaaaaaggagaacgggcaatttctgtgttctttcttttgttcgattcgctgggtatgtttataataaagccttctgaacaccagaacgaagaataacaagaaaacgacggtagcttctcctattttgaacatccaatcttgggaggtgtttaaccaggttacaattcctattcgcagaatattggcaccggctataatccagacggtgccggctgtgataagtaagatttgtctgttaactccgtatttcattggcttttttattgtaataaacggtttgaccgtctgttttgttgactcacttcttgtagaaagtcgtaattaataaagaaattccggttaaaacgactccggtaccgataactccgtgccaaccatacagttgccaaaagctgcccgccagaaatgttcccattgaaccgccaataaagtaagtagtcatgaaaactgtattgatacggttcgaagcgcgcgggtctagttcgaagatacttgtttggttgctaagttggatacattgcatccctatgtcaatgatgatgattccggcaatgataccaataaaagtgttttcaccgatgaagaacagtaaccaggcaaagagaatcaatccgcaaccgataaagttaaagcggcgtacacctacttgctttacgtatcttcctacgaaagaagcagtcaatgctccggccactccgcaaagtcctagcataccgattacgtcgctgttggcgaagaacggggcttgtcccattttaaaagccagacaggaccacatggcgaggagggaaccgaaattcagtgccgcccggatcgaataaatgcgcagttgcgggtattctttcactaaggctaacagagatttcatcaggccgctatactttccctgaaagttggtctgaatgtcaggaaggacttttaatacaacgattgcgcagataaacatcatgcctgcagcgatgtgatacatttcccgccagccaatcagttcaccgataaatccgctgacgacacgtgaagccagaatgccggtcaatagtcctgataagacaatccctacatttctgcctttattttccggacgggagaactgggcggctatcggaatgaatatttgtggaatcatcgaacaaactcccgtgaggaatgaagcgataagtatcaaatgaaaatagtgcgtcagggcgatagtcaatagagagaatatcagaacggtgaagttgaccaggatgattttcttacgctgatataaatctcccagaggggtgataaacaacaatcctgccgcatagcctatttgcgtgaccatggcaatcaggttagttctgaactctgatatgccaagttcatggcgtatcatatttaatagaggttgaatataatagatgttggctaccgagacaccggccacaatagcaagtgtccagaggatagatgccggtagtccaccgttttcttttaatggctgtttcatgcggcaaagataataaaataagatgtttattcgataaagaaagtggtggaaactgtgttgccttctccgtctactgccgtcagggaatgtttgccgggagcaggttgcagggaaattttgtggaaatcctgtgtctgtgtctgataggtgtcgtcgagatgccagaagatagtggcattgggattgctgtgtgccagttccaccgtgataaagcctttgctgccatccagttgcttgggcagcttgatgtgggcgttcatcggagggtagatgaactgcatgggttggaaagaatcttctccgcagccggctttgaaaggtggcagcggtttatattccggatggtgttgtttatagtaccattcccatacgggcggcagggcaaaccatgatttctgaatggtaggttccgtgtttgcacagttttcatagatgcggtggctttcgtcggcggatagtgtgacgagatgatggtaaggacaagcctctgtccgtaatccgacgggaaggatcagtacggtgtcggtttcttcacagaaacgtcctttcagatgaccggattgacggcatatctctgcatcaacaaaaattcctgtgggacgttcaaaccagggtgaagatgggagataattgaatatatcgaataatacgggaccggctgtctgtgcaccgaccaatccgggttttccttctccggttgcatttcctacccatacgcctactgcatagcggggagtcacgccaacggcccaggcatcacggaatccgtaactcgttccggtcttccatgcgatagtctgcatcgaggggattgatttccagtcaatttcttcagggcggttgacttctgttaaggcggaaagggtgagccaggccgctcctgccgaaatgactccttctgaaataactccttctgatatatcctttctcgaagttgtttttcttgaaatggtctttcctgaagtaacttttcttgaaccatctctttccgaaactgtcttttcttctgttcccagtagtatctgcacttccttttcttggggaaggtcgttggaatgactgttggagaggcttcgtcccatttgtgcataagcattcgtcacatcccataaagtagcttcggcacctcctaaaatgagtgataatccataatgggaggctgatcggttgatagtcttgaaccccatttgttgcagcatgtgatgaaatttgggtactccatatctttgtaacatggtgacagccgggatattcaatgagcgggcaagagcttcggaagcggggacggctccttcaaactgcaggctgaagttttgtggagtaaagccgttgatattaacgggtacgtccggtaacagcatttgcggtaatagacttccctcctgtagcatggcaccatagagaaagggttttaaaatactgcctgtacttctgggagcttgaatcacgtctacttgattccccccttgcttacggtcgaaatgtacatttccgcagtatgctaccacttgattggtgggaatgtctataattaggatagccaggttacggatatcacttcgattaaattcattgctccaccgttccgccaaactctctatatgggtttgtattcctttatcgatggttgagcgggtatataatccgtttctttcttgataaaagcgggtaaccaggtggggggctatttgaggaagaggatgtggttcgtcgggtaacggttcgctgatagccaattcataggtggacgcatcaataatctcttcttcaaaaagttgtttcaataaacggttgcgtttggaaagtagtgtttttcgtcctttggatagatgaatcatggcgggggcattgggcaggacggccagcatggctgattccgcccatgataaatcttcggcagaatgaccgaagtagcgccaggcagcagcatccagtcctactacatttcctccgaatggtgcatgggagacatacatggataagatttcctctttggaagtccgaaactccaaacgggtagcccagatcatttcgatgactttctctccgatagttctgggtttgttccgggcgagacggatggtctgcatggtaagggtactgcctccgcttacaacacgtttattctttaaattctgatagagtgctcttccggtagatagcggattaactccccaatggtggtaaaagtgtttatcttcgaaggtaataagacattgcttgattttttcaggtgttgtctttcggggaggaaaccgccattgaccatccgaagcgatacgtgctcccagtaattcttcgtttcgatcagtcacaacggtggagtagggtacatgaaacagttgccggggaaggcaaaagatgtatcctatcatcaaaagagcaatgcttattgtcattactttcttagtaacagataatcgtttgaagaatttatatataggattcatttaaatgttaaaagctatcgactgacagttgttcttcccgctttgctgcgtgcctgtacgtttacatcatacattgcttcacattgaacggcaggaagaataaagttacctgcataagtcgcttgcagtctgacagtgaatacttttgtttcaccacgacgcaaattgaaataagttaataccctgtcatcgcgtatatccagataattatatttgctgacggatttaccggaaccgtcggctgctccgctttccgtttcgggggcaaccattctttcgttgtatatttcccaaccggacggtatgatatgcgtcagtgccagattggtgtaatcggaagttccgctaatattggatatggaggtgatagccataaagtcagttccctgtataatatcattgacagagatcggtgtaccgttcaggttggcatatcttatatccatgcgaagattgtcgctgatggccggtaatgtatcgttcaacaactgtgtgcgtgtgataaggtctacgctaagcgctccttttccttgattcttcacagcaatcataccggatttgggagtggtggcgatttccttttcaaacacagctttagccgatttcacggcaggttgttgtttgtcgttccatgtccatacgaaatccaatgtgcctgacagcttttcagccagacgtcccattgccataagagcaaaagcggtggattgtgtactgaaccactcctcttgtgacagattctttgaaacgacttttgcctgctgtaaagcatcccgttcccggttcatcaggatcagtgtttccagaatcatagcttcatcacggtcggaggaaccgtaaatctgattcatggaagagtaggggcttactgttgtttccgcattatacaccagttcttcagccggtttcatctttccggtcagtgcataggttgctgccagtctccatttagcctgaatggataatcctgcctgttctttcatccggttcatggccccatattccggtgctcctgccaatgcaagcgtatataaacggaaagcctgttgcaattccgactgccattgttgccagccgcttgcatcctgcggcatccgccagttctgtgcggcagcacgttggaaacgcttccacttgttcaatacgttcgaatgaacggcgtatcctttttcttgtgccagtgtcaggaacattcctgcataagaactgatccattcgtcggcaacagcatttcccggccaatatacaaatccgccattggggagttgacgaccataaatctgccggatagcttcctgtagatttgtctttatcttttcggcttctatcttatctattgttttgaattgaccgacaaacagaagaggcaaagccttggaagtcaactgttccgtacaatggtgctgatagttgtataagaagtcgaaccggcggctgatatcaaccgaaggtatgcgtgatacttccagctttatctggttatttgcagaagaactgcttagattgtatgaaagttctttgctttgtccggcttctgcccattgactgttgcgcagggttactatcggattcgggttgcgtacttctatttcaatggtttctttagtttgttgtccgccaccattggctgtcagatggatggtagcctttcctgttttactacctgtttttaaggtaaagaacacgagctggtcatccggttggctaaatttgagcgactgttggttggcccctacaatctgtactcctccaccggatgcctgaagtgatacggttacattcttcacttgattttccatcgcaaagatatttaccggaacggtgatttcttcctgaatactaagcacacggggcaaggtggacaacatcattaacggagtccgcacgaaagccgttttttccgcattgccgtacgctccctcttgtccggcaaccaccatggcacgtaccgaacctacatacatcggaagtttcagcgtatgcgtctggctcttaccttttcccagatagaaaggacctataaacttgactaccggtttgaagcggtttgcttttgcatcggcaggttttaatgtggcgtctccacccgtactgaaaagtgaactgtaacttccggcggaagctcccaatacattatcatacatatcccatgtccggatgccgagtgcttcgcgtgaatagaaatcattccatgggtccggggttttgaaattggtaagatccagcaaaccgtcgtctacaatagctaatgtataagtcatcggttttccggtcttttcgctgacggtcacattgaagttggtttccgggcgtaacacttccggcatctgtatctgcggttgcaacaccgtctgactgttagtcacgaataccggaacgacgccatacatacggataggcaggtcattgactgtttgcgcgtgaggctgtaacagactgatatgcagatatacattcggagtcatctccggtgtaatcttgaatgtatatttcgtatctcctccgttggaaacctctatccattcttgtcgtaatacggtagaaccgttttctatggataccagtgcacgtcctcccgctgctgcaggaatgattgctgtggctgtttctcctatttcataagaatctttgttcagcgagaaagcaagcatcttgataccgctgggatcagtcttgctcgaacgtccccgccattccggccagtcaacataaactgtacctccggtggcatgtccactctctttatctttcacgtaaaccaggtagcgtccccatgacggataatcgatacggaatttgaaagatgcttttccgcctcttgtctgtaaattgccgctggcaacaggagtgatggaactgttgttgatatacgttccgaaagattcaccactgttttcccaccaccaactccagccgatgcggtatattttgtattccagattagaactgttcactaactgtccctgcgtgtttacagttacaatatcgaatacatgatctttgtcagtttcaatatatttgccttttggctggttcagattgataccgacataagaggtgaatggtgagaatggaattgtttgagtgtagatgctggcatctcctcccggttcgaacacgcgggtggtgaaagtggcgttcagcatacccggcgcttccgttgcggtcggaactttcagcatgacatttgcttttccttctgcatccagtgtgccgtcaaatatatctgttttgatagtcgtgaaatccgtagccggattgttaaagatatattgtccgtaattcttaaactgtgtattcactttcgataaagacatttctactttggctttcagtttggaggcagttgctcctgtcagccaggttgaagtgagtggggcatagaaattcttgtccgtggcttgaagcaccttcggcaatgccagatttattttcaagcggttgggctttatggtttcgatacgcagacctttgtggaaggtggttcctcccaccttaatatacgcattccaaagtccggtcgggtctgttgcctgtgtcggaacgtcgaatgtatagaatccgttcattccttgtgttgaaatcatttttgtgtagaactgtcctctcggattgtaaatctccagtgctacgggatgcttgtcggggattctcttttcgcggtcttccaatataaaggaaatgtgcagcgtgtctcccgggcgccatactcctctttcgccatatataaatcctttcagtcccttttgaatatcttttcctcccacgtcgaatctgctgacggactgttcttcaccgtccacaacgcggacgtacgctttttgcttgtccgattctgccacgataatgaaaggcacaccgttcggagtgatttcaacgaatccttctccattggtttctcctttccctatgggttgtaattggaaattatacgctgttacctgtgctttccctatcggttttgtatccaaaatattactaacggcaatccacagtttattcagtgagttccgttttacaatcattcccaggttggaagcaaaaacgttgcaggcagctgcccggtctgaatccatataataagacggatggcaggggttgtcgcgttccgtccatcggtacacactccagtccattgttccgccattgtaataatagtaggcttcgggggtattccagattgcttcatcttcttcggacaaaacacttccacttactttggtcagcccgtcggaggtgctgctgtcggcgaatttcatatcctgattctcgcctcctccacaaggataagcggagtattcctgacgaaatgaaagtatgacacgatagatggcacccggttcctggtggattaatccggcaaggtctatcgagtaatctccccaatgatgaatgtctttggaagcatctttggcaagccataatgttttcttgtaaaccagtcttcccgaacggcgtagctcattggccgaggccagtgaattggtttgcataaacatcaatacattgttctcgaaaatgcggatcacgctcaaatccacagcgtataggttgacagccctgaaaggaataatcagacttttcgaatcgggcaggatagcggcggtagtagacatttccacttgtggcttcagacttacttcactgaatgagatcgtatgagaagttcccaatgctttaccttgacagtctttgactccttcatggatattcaacgtcagtttgttctgtgtgtttgcttcgaaatagataaaaactctgttctcactgatttggaagatcgatgaggagatttccgggatctcaatcagtccttttaaatcttgagtagtggataagggagcggagaaaacaatctcgattccattttccggttggtcgatgcgttcggcagacatgaaacggaaacaatctttcgccggtatcagtacttcttcgctttgtttacggtcgatgccggctgcgttgccgttggctgtgatagtcaaggggtaatcatcagcttctctggggatttgtctgatactaaacaaataccgggtatgattgtcggttgcggtgacttccaccggataactcttttttccgtcactggcagtcagcatcttttctacctcttcctttttcactacgtcgctgaaacgtatctctcctttaatatttatttcattcggtcgggtagctgtaatcggcaatgattccagttgcagggtgaagttacgttcctgtacacggaatgagaagttgaactctttcagctttttgtccacttcgatgaagtctccgagccggaaagttccttcgtaaagtgttcccggtttcagcgctccttcttcgggcacaaattcaatggtgttgttgctaacccaatatgcttttccttttaatgaaggtgagaaactgaacggattgctttttaactcattgttcatatccaccatgggttggtcgtgggtcagttctatacgtatggtcgaattttgcgagatgactcctcccgtatacgcatttacatacggtgcataatcggcagaaggaatgatgtctttttgagtgcgtgtgcatgaatataggcccacagtcatcatgataagtaagaatagtccggtagcactgatgctacgtgtagtctttgtttgtcccatagtgagaagttttttatagttcaacaaacaaatatacagtttttatgctaaatcctttgttattctgattatttttgcaagttcttaatcaatttatttatggggaaaaagaaagaatacaaagaggccaatcggcgatttttgaaaaaactatcttttcaggaaggtgttttcgcgttgccgtgtggaatctattacaaagttttggaaactggcgaaagtacgatttctccgggtgcacggagcattgttaccgtgcattacaaaggaagtctgattgatggccaggtgtttgataattcttatgagcgtacttgtcccgatgccctacgtcttagtgatgtaatagaagggtggcaggtggcacttcagaaaatgcatgttggtgataaatggattatttatattccttatgcaatgggatacggtatcaaatcttttgattctattcctgcctactcgacattgatcttcgaagtggaattgcttggtgttgcatagagcataaagatgagctatatacaatcagatacatggatatttttcttttagctttttcataaaagacttgcttacttgtaaaagttccatctcattaaatggaggaagcaatatgcaattgttgtcttcaatcgaaaccagatagcttatattgataatgtgtgactggctaatctggataagatagggatgcagactcaatatcttttgtgagtttgtatttcttttgagtgccagggtatgattattatttaatacagcttcccatagtttactcttggagttataccggaaatagccaatctgttctaaatggattagttgcaagtttccagtaatggtagtatataaaaagatcttttcttcttgatgtttttctgtgtcggtgtgattacaattgtcaatattcatattctatttatcttagtattcgattaatctgttgatgatgccaacgtcgtagttttattttgcatcaaaagtaacggattgcttttagctataaaaataaaaagtgtctcattcctgaaatgagacactttttactattaagaattgtgcttttaaaaaaagaaattattgttctactctttgattctcaatgaatttactgggtgatacaccatacttttctgaaaagttacgatagaaagttgcccgggaggtgaaaccgcatgcaaacatcagttcttttacattactctttggattttcggcggctaactgtctgaaatattccagtcgaagataattaatgtattcccggaaacctgtaaagccctgacttttgattgctgctgaaatatcatgttcctgtttattcagggacttggctaaaagttctatattataccgttgatcggtatagggatgctgttcctgaagataggcttcaatcgttgagaagagcgggagagtaggagatggctttccagcttgtagcattatagtgctttccgtattctttgcattatgaatcatgtttatatggttcgaaaacggattctcataacgtaaatattgtatggagaataagaccgtaaaaacgattgccataatgccgaacagattgaaaacaaattcattgatatttagagtgaacaaaatgtatatccctaaaaatacgaatagaaaaccgatgaatagatacatgttattatttatcctgcggtaggtcttgttattcatcatcggataaataagaagaacgagtggggtaaaaacggataacaggaatatgcaaaccctaagcttgacatctatttgatggatattcggaataatttcatctatggagtggatgggagtgatattcccattgaaacctaaataactgattcctacagttatcgtaatgatgggtaataatagaaaagtaaatattctgaaatggttcagatagcccggtgataaagaagcgatagggaacagggctacaatatttgctaaagcataccatttgagcattttctctatgttgagcaattctgtgaagttgtattccggagtgtctgtgacaattgtcaaccatccgatattttcccatgaaaacataatgccgatgccggttgctataattccccaatataatttcggataattgtctttagcacgtataataaggatgattcctataattaacgcaatcagatcaagtgtaagctcaatagatagatgtgtaattcccatttttttgacgtgtttctattccttgccagtcagtgtgtaaatgtttcccgtacaaaggtaggcaaaatagaaatatcaggcaataaaaaagatatggctttggagaaacttagttgtgcggcgatatgctatatttctttcgctgaatcattttcggccaattctttgatctctttattcaaaaatacagaaagcacagttcttactacaaccactccacccaggattgccaattcgtccaacgttggatcaaccacagtttttagtatgtcggaagcaattagaaattccaatccaagcaaaaggtaagtgccaaaatccgccctcaactgccgtatattgttaaccgtatatgttccgttgaatcgttttatttcattgcgtaaaaaggcgatgaagcagactaatactccgtaagtgacaattagcagactaataacactgataatagtggcaagtgtatttaagaatgtgagtagcattgttgtataatgttttagtatctgttatgtaaacaggcgaagtcatacaaaagttctcgaattagctacattatttgctcttacaggtttatatttgtatattcaagttaaaagctacctatttgtccagtttaaatagtgtctggagggtattcaaagtgggttgaaagtggatgtaaatcaaacactgattggtacaaaggagaaagaaaagatgatatggtttatatgaagtaatacatttctgaataaatttatccatatcaaattattacaaataaaaagaactcctgtaatcgttaagattacaggagttctttatctatataaagtaacctgaattacttacctaaagcctgagcaacatcaaccgcacaagctactgtacatcctaccatcgggttgttaccaattcccaggaatcccatcatttctacgtgagcaggaactgatgaagaaccagcgaactgtgcatcagagtgcatacgacccatcgtatccgtcataccataagaagcaggaccggcagccatgttatccgggtgaagagtacgacctgtaccaccaccagaagcaacagagaaataaggtttgccagcaagaacacgttctttcttgtaagtaccagcaactgggtgttggaaacgagtcgggttagtagagttacctgtgatagatacgtctacaccttctttccacatgatagctacaccttcgcgaacgtcgtcagcaccataacattttacttttgcacgagggccgtcagagtaagcgatttcgcgaacaactttcagttcacctgtgaaataatcgaattgagtctgaacataagtaaagccgttgatacgagagatgatctgagcagcgtcttttccaagaccgttcaggatgcaacgcaacggttctttacgtactttgtctgcttttgcagcgattttgatagcaccttcagcagcagcgaaagattcgtgacctgctaggaaagcgaaacatttagtttcttcgcgcagcaacatagcagcgaggttaccatggccgataccaaccttacggtcgtcagctacagaacccgggatgcagaatgcttgcagaccgataccgatagcttcagcagcttcagcagcgtttgtgcagtttttcttaagagcaatagcagtacctactacataagcccattttgcgttttcaaaacagataggctgagtttcttcacacgttttataaggatcaagtccggcagcttcgcagatagcgttagcttcttcgatgtctttgatgccgttagcgttcaaggcttcaatgatacctttgatacgacggtcttggctttcgaattttacttctctaatcatagttttctttcctccttatattattcgtgacgtggatcaatagatttaactgctccctgttctgctgttacgcgtccataagtacctgtaactttcttcaaagcttcgttagcatcagtacctttcttgatttcgtccatgaacttacccatgtgtacgaattcgtatccgcagatttcgtcgttcttgtccaagaagatttgtttgatataaccttctgccatttcaaggtaacgaggacctttagccaaagtaccataaagagtacctacctggctacgcagacctttacccaagtcttccaaacctgcaccgataatcaagccaccttcagagaaagctgattgagtacgtccgtatacgatttgcaagaaaagttcgcgcattgcagtgttgatagcgtcgcaaacaaggtcagtgtttaatgcttcaagaactgttttacccggaaggatttcagaagccatagcagctgagtgagtcataccagagcaaccgattgtttcgatcaaggcttcctggatgataccttctttaacgttcagtgtcagtttacaagcaccttgttgaggagcgcaccaaccgataccgtgtgtcaaaccagaaatatcaacgatttctttagattttacccatttgccttcttcgggtatgggagccggtccatggttaggacccttctttacaacacacatgtgttccacttcgtgtgaataagtcataattagctctttttttaagtgatataattaaaaatacgtagtcacgattctctaaatcgcccacaaaggtagtcgatttatttgtttctgcaaatcgccttttattacttttttgtgaaaagtgacaaatctgtttacgtttttttgtcgtttgtaaagtcgggattgcatttgtgaaagattgagaccgggagaactatctattctttgctttgttgttattagaaaaagaaaatttatggaactgaatcaagtagatatacattatttaatagcggcaatttgcgttatttcatctgcacttattttttatacgataggtgtttggggagaacgtcttcaaaggaaattaaagttttggcatctcattttctttcttctcgggttgttggctgatacggtgggtacaagcctgatggagcatattgccgaactgactcatctgcatgacgaaatgcatacggtgacaggggcaattgctattcttctgatgtttgtacatgcgttatgggcgatatggacctatgtgaagggaacgcctatagaaaagagacattttaatcgtttcagcattgtagtttggtgcatttggcttataccttatttaataggggtttatttggggatgcgattacacgtataggattaggcagcagataaatagggggagagggattattccgctaaaagcttacgttatttagttcaaaaggatacaaaaatgagggtgttcggagaggggtgtacaaagcgctgaaacgcccaccagtaaagggggaaaagccaatgaaaaccagtagagtagagaagagaagagtaaagaagagtaagtaaaagtattatttctgttataaacaacagcaataatactgggcagagaagatggctttggatgctgccgttgtcggttcggatcacttcgtcggtaccgtttctgttcccgtgtccctcatgaactgttcgtccggcagatgaccgacttttgtctggtaggttgttgatgctcgcccggtaggtaacggacattcacacggtagataacctacgtttgtacgttaggtaaattcaatattatttcacgggctaccgtttcaatacttgtttgctaaagtatcatttgcttcaaaaccgtaccggaaggaatgaaacggattgataattgtttttagtaagattgtaggcgtatcattattagatatgggattaaagttgtaactttgttgcttcaaatattaaatgaagatatgatcgaagttttagagtctgctttacagaaggctgcgggtgaaggaatggatgaatttatccaagcgtttacagataaatataaagagattatcggtggcgaactaactgccgaaacaatgcctctgctgacaggagaacaacattctttgctggcatatcagatttttcgtgatgaggtgatggtagggggattctgccaattgattcagaatggctatggtggctatatctttgataatccgtttgcgaaagtgatgcgtttgtggggagcggaagaattctctaaattagtttataaggctaagaaaatctttgattccaaccggaaagatttggaaaaggaacggacggatgatgaatttatggctatgtacgagcaatatgaagcttttgatgagttggaagaagcttatttagagatggaagaacaagtcacagcattgattgcaagctacgtagatgatcatttggaactttttgcaaaaataataaagtaacggatgcagtattttttaagtacttgcatttattaattatgaattagaatttatatctttgcaaaatctaaaaaatatgtttatgaaacaagtgaaatttttcttggtggctttgatggctgtggttatgggtatgtcagttacttcttgtatgaaaggagaaaataatacagtagtacctgtatatggtgtgattactttagtaaatacattcccataccagtttcaagtagaaggtagtaacgtaatatttgaggctagttcaatgtcaatccctggtttatctagtgatgcatatagtggggatattgttctgctgaatgcacaatatgatacggaaacgcaacctgttgatcagaacacaaaaaagatcattgtggaagctgctggagctgaaaagttgaatgttaactcatacgtttcttcagatgatgtaacgtataatcgttctataatttctctgagtagatatggctctagtgtttcaccttatctttacagtgcaaaatggataatatttcctatgcctttctgtgtcgaaaaagaagagaatgtgtctagtcatactttttatttagtgtatgataaggagaatactgcaaatgatgataatactatggtattacgtttacgccatacttctactgaagatgccgataaagaaaagactgtagtgactcgttatagggcttttaatatagctaatgttgtaagtcgttttgaaggtactaaactcaaaactattaaaattatagtaccagaacaaacgggtgattcacctaaaattgaagaaggttcaaataatgggtataaggatgcaacttatactattaatgattatgataaatacgtaactaacaattgaactacaaagaactatttaacatagcaatgaaattgatttcctctccggccaaggcttgggaggaaatttctatggaagaggataggcgaaaagtatttatggcttttgtctatcctatgattggtttatgcggtctgtccgtattcatcggttcgttattgacgaatgggtggggaggtccgcaaagtttccagatagctatgaccaattgttgcgccgtagctgtagccctgttcggtggctattttctggcagcttatgccatcaatgaaatgggaacaaggatgtttggtctgcatagcaatatgccgttgacacaacagtttgcaggatatgcattggttgtgtctttcctgcttcagatagtaaccggactattacctgattttagaattattgcttggttgctgcagttctacatcgtctatgtggtatgggagggagttcctatactgatgggagtagaagaaaaacaacgattaaaatacacccttttgtcgtctgtattgttaatactatgtccggcggtgatacagatcgtgtttaatagactgacggctatacttaattaatgagtaaagatgaaacaacctcctgtaaatataaagaataaacgggctacgtttgattacgagctgatagatacctacacagcaggtattgtattgaccggtacggaaataaaatccattcgtttgggaaaagccagtctggtagatacgttttgctattttacgaaaggcgaattgtgggtgaagaatatgcacatcgccgaatatttctatggatcgtacaataaccatacggcacgtagagagaggaagttgttgcttaataaaaaagaattggaaaaacttcagcgggagatgaaaaatcccggctttacgattgttcctgtacgcttgtttatcaatgaaaaaggtttggcgaaactggtagtcgctttggcgaaaggtaagaaagaatatgataaacgggaatctataaaggagaaagacgaccgtagagatatggcaagaatgttcaagcggtaactaaaaaccgctataagataaacgccggactgcgaagagtctggcagatgatggcagagtaggtaattaggaattaatgtgatagggtaatgaaaaagacaatttctcaagtcgtatccgagcgcatccttattctggatggggcaatgggtacaatgattcaacaatataacctcaaggaagaagattttcatggtgaacgatttgcgcatatccccggacagttgaaagggaataacgacttattgtgtctcacacgtcccgacgtgattcaagatattcatcgtaaatacctggaagcaggtgcggatatcatcgagaccaatacattcagttcaaccacagtttctatggctgattatcacgtagaagaatacgtgcgtgagatgaatcttgcagccgtaaaactggctcgtgaccttgctgacgagtatacagccaagaatcccgataaaccacgttttgtggccggctccgtaggacctaccaataaaacctgttctatgagcccggacgtgaacaacccggcttatcgtgctttgagttacgacgaactggctgcatcctatcagcaacaaatggaagcaatgctcgaaggtggggttgacgccattctgattgaaacaatctttgatactctaaatgccaaagctgcaatttttgctgccgaacaagccatgaaaatgacaggcgtagaagtgccgatcatgttatctgtaacagtgtctgatattggcggacgaacattgtccggacaaacattggatgcatttctggcttctgtgcaacatgccaatatattttcagtcggtttgaattgctcattcggtgcccgtcagttgaagccgttcctggaacagctggcatcccgtgcaccttattatattagtgcctatccgaatgccgggttaccgaatagtctgggtaagtatgaccagacacctgcggatatggctcatgaagtgagagaatatattgaagaaggattaatcaatattattggtggctgttgtggtacgacagatgcttatattgctgaatatcccgcccttgtagaaggagctaaaccacacgttcctgcctctgcgccggattgtatgtggctctccggacttgaactgttggaggtgaagccggaaataaactttgtgaatgtcggcgaacgttgcaacgtagccggttcgcgcaagttccttcgtctcatcaatgaaaaaaaatacgatgaggctctttctatcgcccgccaacaagtggaggacggtgctttagtggtcgatgtcaatatggatgacggattgctggatgcaaagacagagatgactattttcctgaatcttatcatgtccgaaccggaaatagcccgtgttccgattatgatcgattcttccaaatgggaagttattgaagccggactgaagtgtcttcagggcaaatcaatcgtcaattctatttctttgaaagagggagaggaagttttccttgaacatgcccgaatcatccggcaatatggagccgctgctgtggtcatggcgttcgacgagaaaggacaggcagatacagccgcccgtaaaatcgaagtttgccaacgggcttaccgtcttttggttgacaaaattggttttaatcctcacgatattatttttgaccccaatgtgcttgctgtagctacggggattgaagaacataataactatgctgtagattttattgaagctaccgcttggataaagaaaaatctccctggtgcacacatcagcggaggagtcagcaacctctctttctctttccgtggcaacaattatatccgtgaggccatgcatgcagtgttcctttatcacgccatccaacaaggaatggacatgggaattgtgaatccgggaacttccgtattgtacactgatattccggctgatgtcttggaaaagatagaagatgttgtcttaaaccgtcgtccggatgcgtcggaacggcttatcgaattagcggaatctctgaaagcaaacatgagcgaaactgccggacaaccggctgtcaagcaagatgcctggagagaaggaactgttcaggaacgtttgaagtatgccttgatgaaaggaattggagattttctggaacaggacttggcagaggcattgcctctttatgataaagctgtcgatgtaattgaaggaccgctgatggatggaatgaaccatgttggtgaactgtttggtgccggtaagatgtttcttccccaggttgtgaagactgcccgcaccatgaagaaagccgtagctatcttgcaaccgatcattgaatcggaaaaagtggaaggaagtgcttcggcaggtaaagtgctactggcaactgtaaagggggatgtgcacgacatcggaaaaaacattgtagctgtagtgatggcctgcaatggttatgatattgtagatttaggagtaatggttcctgcagaaaccatcgttcagcgtgctattgaagaaaaggtagatatgatcgggttgagtggactgattactccatctttggaagaaatggctcacgtggctgttgaacttgaaaaagcaggtttggatattcctcttttgattggtggagccactacatcgaagatgcatacggcattaaagattgctcctgtttatcatgctccggtagtacacctgaaagatgcttcccaaaatgcaagtgtcgcttccaaattgctcaacccgcaggcaaaagccgagctggtgaatgaattggaaacagaatatgaagcactccgtgaaaagagtgggctgatgaagcgtgaaactgtttcgttggaagaagcacagaaaaataagttgaacctgttttaaacattgtcacaatgaaaaagattttctctttcttatgtctgattgtagcagtcactgctatgacctcctgttcttctgcaaaagaagaaaaaggaacatccggaaccggaaatgctgtgttggataatattttcgagcgcaaaagtgtgcgtgcttatctgaataaaggagtagagaaagagaaaatcgacttgatgcttcgtgccggaatggctgctcctacgggtagggatatccgtccatgggaatttgtggtagtatctgatcgtgccaaactagattcaatggcagcagcacttccttatgccaaaatgctgacgcaggcccgtaacgccatcatcgtctgtggagattcagtacgctcgtcatattggtatttagattgttctgcagcagcacagaatattttgttggctgctgaaagtctgggattgggtgctgtatggacagcggcctatccttatgaagaccgtatgcaagtagtgcgtaaatatactaacctgcccgataatattcttccgctttgtgtcattccttttggctatccggctacaaaagagaacccgaaacagaaatttgacgagaaaaagatacattataatcagtattagtaaacaaaaattttgtcttttcaataatttccttacatttgcgtctaaattgattaaaatctgatacgcaaatgtttggaatagacgacccttttattattctgccttacctgctttcggtggtatgtgtgatttttgctgcctggtttgggctgaaatattggaataaggacgacgaaaaagacgaaacccgatgaatacatttactcttggactaattgtggtagcttatctgctgtcactggcctacctcggctttttgggatataagaaaacaacgaataccagtgactatttggtaggcggacgtcagatgaatcctatcgtaatggcactttcttatggtgctacgtttatttctgcatctgctattgtaggttttggaggagtggcggctgcttttggaatgggtattcagtggctctgtttcctcaatatgtttgttggggtggttatagcttttatttttttcggtttgcgtacccggcgtatgggggcgaagttgaatgtgagtactttccctcaattattaggccgtcatttccgttcccgtaatatacaggtatttattgctgctgttattttcatcggaatgccgctttatgcagcggttgtaatgaaaggtggagccgtattcatcgaacaaatctttcagattgatttcaatgtttccttattgatatttaccttggttattgctgcttatgtcatagcagggggaatgaaaggagtaatgtatacagatgctttgcaaggagttatcatgtttggctgtatgttatttctgttgttttctttgtatcaggtgcttgatatgaactttatcgaagctaataaagaattgactgccattgctccgctagttccggaaaagtttaaagcgctaggacatcaaggatggactgcaatgcccatcacaggttctccacaatggtattcgctggtaacttctctcattttaggagtaggaatcggctgtcttgcacagccgcagttagtggttcgctttatgaccgtggagagtagcaagcagttgaaccgcggtgtatttatcggttgtttctttctgattataacagtaggggctatctatcatgctggagccttgagtaatcttttcttcctgaaaacagaaggagcggttgctaccgaagttgtgcaggatattgataagataattccatattttattaataaagcgatgcccgactggtttgccgcactctttatgttgtgcatcctttcagccagtatgtctacgttaagttcgcagttccatacgatgggtgcttcggtaggctctgatatttacggaacttataaaccccgttcacggaataaacttaccaatgtgatccgtctgggcgtattattctctatcctggtcagctatattatttgttatatgttgcctcatgatattatagcccgcggaacttctatctttatgggaatttgtgcagccgcttttcttccggcctatttctgtgctttatattggaagaaagctactaaacaaggcgtcatgacaagtctttgggtgggaacaatcggcagtctgtttgctcttgtgtttcttcatcagaaagaatctgaagcattaggtatctgtaaagcgttattcggacgggatgcgttgattaccacttatcctttccctgtgattgacccgatattatttgccttaccattatctgtattggctattgtcgtaatcagtctgatgacctataggaaataagtattaggtattacacctaatacttaatactttatctcatgcttttattttctttttgtaggattcgtagcgcgacataatatctcgaacgaaattgtaagtctcgatgccacggaaatatccgtttttgcagacaggatcgttgaagtattcttgattgcttttaagcaagatgaagttttctacattatctttccatactaatttgtttttcccgtatttttcggctagtgccattgcgtcatatatatgtcccaaaccggcattgtaagatgccaggataaaattgagccgttcctgcttatcgggaatcatgctgaaactccggtcggtggcagtaatatatttgatagccgctttcacactttcctccggattctgctctttgccgggaggtactcccattgcacgtgctgtggcaggcattaactgcatgagtcctttggcacctgcccaagatacagcggtagtgtcaaaattggattctgtatacgctaatgatgcaagcatacgccagtcccaaccgatgtctttggaatactttttgaataaatggtcataatgagatatctttccttcttttaaggagaggataggagagtgcggcatcattttactattctcaaaataacgtttcatactggctgtgtaagcaggagaagtcatgttttcctgatgccattgggtagcggcggctgcgagctcggggctgtcttttcgtaccgcccacgaagaacgttgatcgaaactgatggacaggccgatatttaaattgggataataggtcttattaagtctggctaaatcattgtcggccaccgtatacagaatttttccttgcgctacttgcgtaatcaagtcctcaatagtgatactgtcattggtgacttcatgaatccggatacctcctcctaattcactattcagattgacgaggcggtcataatatttccctggttttacgtatatatcttttcctaccagttcggttacatctttcaacggcttctgttttcctcttccttgctgaacaattacctggtgagtaattacatcttcgccacaataaagaagactgtctttccactctttggtgattggcagattataggcaatcatgtctccttcacctgccaataatttttggatcatttcgtcgacgctgttggctacttcaatcctaagttttagtcccaggcttttggcaaactgttcactaagttcatattggaaccccatttcttgtccccggtaaatgaaataggaagtagagctatataatgtcaatacaacgagttcgccactatcttttatttgtggaagatcacgcgctgtctcatccatcttgttatgatgcttattccggcatccgagcatacaacaaaatagaataagaaataaaggaatactcagtgtcttgacattcatttcttaatttttaattttcaatttttaattcttaaggtgcttcttgatgtacatagtcagtatatcaatagctaccctattactgcctccttccggtacaataaggtcggcatatcgtttgcaaggttcgataaattgcaggtgcataggttttaaaacccgtgtatagcgttccattacagcttcggcagtacgtccgcgctcaatgacatctctctgaatgacacgaatcaggcgttcgtcgggatcggcatcaacaaatattttgaggtccatcatattgcgcagctttttatcacataaggcaaggattccttcaatgataaccacctcacgaggttcgatatgaatggtttcgggctggcgcgtgcatgtgagataagaataggtgggctgttcgatactcttcccttctttcagcgtcatgacatgcttggatagcagactccattcaaaagcatccggatggtcaaaattgatattctggcgttcttcaaccgggacatgactactgtctttgtagtatgaatcctgtggtaagagtactacttctcctgcggggaggctttctataattttccgtacgacggtggtctttccggagcccgttccgcctgctattcctataattaacatctctttaaatgtatatttgaaccaaatagagtatttttgcattactattaatgtggtaaacgcattaacaagacaaatatagaaacaattcattaaaataacaacgtaatggtaaaacacattgtattatttaagttaaaagacgaagttcctgctgaagggaaactggaagtcatgactaaattcaaggaagcgatagaagctcttcctgctaaaatttctgtaattcgcaaagtggaggtcggattgaatatgaatcctggtgaaacatggaatattgcgctttacagtgagtttgatacactagaagatgttagattctacgcaacacatcccgatcacgtagctgccggaaagattctggctgaaacgaaggagagccgtgcgtgcgtagactatgaattataaaccccaaaaataaagatgagaaaaataatttctttcctgcttttaagctttgttgtatatgcattgcaagcgcagatcaaagatccggtaaagtttaaaacagagctgacagctctctccgatacggaggcagaggtggtgtttacagctaccatggataaaggttggcatgtttattctaccgatctgggagatggcggccctatttccgcaacattcaatgttgataataaatcgggtgtcgagcttgtaggcaaactgaagcctgtaggcaaagaagtatctactttcgataaattgttcgaaatgaaggtacgctatttcgagaatacagcaaagtttgtgcagaaagtaaaattcacgggtggagcttacgcaatcgaaggttatctggaatatggagcttgtgatgacgagagttgtctgcctcctactcaggtgccgtttaagtattccggagtagcaaaagccggaaatgccgctgcaacaaaaacagagcaaccggagcaaaaggtagcggataagcaaaaagaagaacccgttcctgctgctacgaaagattcttctgcgatgatggaactggtgcctgcaactacaaccgaagctgctacggatattcagcctgctgttgcatcgggtgatctttggaaaccggtaatcagtgatttacaagccttaggagaagaacatggtcaggaagacatgtcctggatatatatattcataacaggttttctgggtggattattggcattgtttaccccttgtgtatggccgattattccgatgacagtcagtttcttcttaaaacgtagtaaagacaaaaagaaaggaattcgtgatgcgtggacatacggtgcatctatcgtagtgatttatgtggcattgggcttggctattactttgattttcggagccagtgcattaaacgctttatctaccaatgctattttcaacattctcttcttcctgatgctggtgatttttgctgcttcattctttggagcgtttgaaatcaggctgccgtcgaagtggggaaatgcagtagatagcaaagctgaatctacgaccggattgctaagtattttcctgatggctttcacgctttcattggtatctttctcttgtacaggtccgattatcggcttcttgctggtacaggtatctacaacaggaagcgtagttgctccggcaatcggtatgttaggatttgccatcgctttggcattgccgtttacactcttcgccctgttcccgtcttggctgaaatcgatgccaaagtccggcggatggatgaatgttatcaaggttacgctgggtttcctcgaattagcatttgcacttaaattcttgtcagttgctgatttggcttatggttggagattgcttgaccgcgaaacattcctggctttatggattgtcatctttgctttgcttggattctacctgttgggcaagatcaaattcccgcacgatgacgatgataataaggtgggagtaacccgcttctttatggcgttaatctctttagcatttgccgtatatatggttcccggtttgtggggagcaccattgaaagccgtatctgcatttgctccgcctatgcagacgcaagatttcaatctgcataagaatgatgtacacgcgaaattcgatgactatgatttaggaatggaatatgcccgtctgaacggaaaaccggttatgctcgactttaccggatatggttgcgtaaactgccgtaagatggaagcagcggtatggactgacccgaaagtgagtgatttgattaataacgactacgtattgattacactttatgtagataataaaactccgttgactgaacctgtgaagattatcgaaaacggtacagaacgtactttgcgtactgtcggcgataaatggagctatctgcaacgtgtgaaattcggagctaatgcccagcctttctatgtattgctggacaatcagggtaaaccgttgaataagtcgtatgcttataacgaagatattcctaagtatattgaattcttacagaccggattggagaattataagaaaggaaaataatgatttctccgataatgaccaatcttggataatgaataaaaaagcggtctcatcttttcgatgaggccgctttttgaatagaataaattgaaattttagcgaaaattacatgggtacttctattaatagaagttgggttccttttaatatatgtatcgggaattcttttgtatcccaaacaccgataccatcacgtttggacagccgttcttccgccactgtgatttctccttcaagtacgaagatatataccccgttaccttcctgatgcatcttatattcgattgttttttccgtatcgaaacttcccatagagaaccatgcatcttgtttgatagaagctggagtcttcccgttcggagacaggattagcgccagttcatttggtttcaggagcggacgaatatcgaagttgttatactccggtttggtgttttcaactcgtggaaatacccatatctgcaggaattccagttgttctttatcactgccattgtattcactgtgataaatgccgctgcctgtactcataacctgaatatcacccggagtgatggtttttgtgttttgtacactgtcaccatgtttcaggtatccttttagggggatggaaatcacttccatatttttatgcggatgtgtatcgaatcccatagacgggtctacactgtcatcgttcagcactcgtaatgctccgaaatgaattctttccggattataatagttggcaaaactgaatgtgtgatgggtcttgagccagccgtgattgaaatagcctcttgatgaagctctgtcgattacttttttcataatcttcctttcttttttaatagaactttggtgtgcgtcttatttgcactttactattactaataacaatggaaaggtagataaagttcttaacgggagatttaataagaagggagctttatttttttatttcagaaaaaatacatacgtttgtaacatcataacaatacctttgtggccaaaaataaagaaagtatgtacgcaacagacactctaatggatgaacgggaagtggttctccgtctgatagacggagatgaagaggccttttgcgaactttatgccgcttataagaatcgtttgctctacttcgccctgaaattcgtcaagtcgcatgaatttgcggaggatatatttcaggatgcgtttacggtagtttggcaaacccgtcgtttcatcaatcccgaagcctctttttcttcctatctttatactattgtgcgtaatcgtattttgaatcagttgcgggatatggctaatgaagatcagctgaaagagcagattctttctcaagcgatcgattcaacgaacgaaacgaataatcatattctgctcaatgatttgaaagagattattgcccgtgcattggagcaattaacgccccgccagcgtgaggtatttaaaatgagccgtgaactacagatgtctcataaagaaatagccgaagcattgggcgtttcagttcatacagtgcaagaacatatttctctttctctaaaagtgattcgttcctatttgactaaatattcaagtacatcagccgatgtacttttgattctattgtgcttgaatttataataaatgttaatcacaccctagctctttcttacttttgtgtattacttatacaaagggaaggaaattaatatccttattttgaatatatgatgaaagatactaaaacagaaaaagataaattgcatcgctatctggatgatctttatacccgggatgatgcttcacagttgttgcaaagtattaaggattcagaaaaccaagatatattggacgaactggcagcagaggtttgggaagaatccgggaacctgcaacctggtaatgatttggagcgggaaaaatataagagagaggcacgccaattactgaagcgtattgaacacaaaaaacgtacatggttccgccgggcttctgtggtggcagttagtacagcggctgtaatagccattatcatagggagtgtcaactttttccggtatatgaatgcacaacaggtcacactggctgaaatcaccacttcctttggtgagaaaagacaagtgactttgccggacggaactcttttggttctgaactcttgttcgcaagtgcgttatccggatcgttttgttggagatctccgtgaagtggaacttgaaggtgagggatatttccgtgttgcccgcaatgaaaagatgccatttattgtgaggacgaagcggctggatgttcaggtgttaggtacccgatttgatgtaaaatcctattcaacagatgaaatagtgtctgtgagtgtggagagtggtaaggtacaggttgatttaccggaagcgatgatgaggctgactgctaaagaacaggtgcttatcaatactgtttccggagaatatagtaagaaaacggaggataggggagtggctgtctggatgaaaggcgggttacgtttttacagtacacctatccgcgatgtggcaaaggaactggaacgggtatataattgccggattacttttgcttccggtcaggatttcaacaacttgattaccggcgaacatgataacaagagtttggaagcggtacttaaatccattgaatttatcagcggtgatatcaaatataagaaagagggcatccatgtgcttctttataaagaatgagatgaataatagataatgtttaaccttttaaaaaataatagatgaaaacagctccttcatgaacctccccaaaatgatagaagcactccaaaggaatgcctctatccgcaatccggacggatattcataagcttcgacccaaatgaataacgtatcgcgcattgcttgtttttaataactttagtcaattactaaaacgcacaaatttatgaataatcttcttatttgtaaagggataagtaaaaatagctgttcgtttttagcttttttactattcaccttcattttaatagctccggctgctgctcagacattgaaagagcatgatattacgcttcgtgtgcaaaacgagccggtagagagtgttttcaataaaatcagcaaacagactaattttaagtttctctatgatcaggagacggtgaacaaggctccgagagtttctttcgacattaaaaatgcttcattaaaacagattctgggagaaattacttcccaggccaagctttatttcaataggaccgatcatacaattgctgttagcaaacagccgcttaagaaagaagaaactgttcaacgtacacgtactatacaaggtattgttgcagatgataaaggagaaccggtgattggtgccagtgtgcagattaagggagagggtagtggtacgattaccgatatcgacggacgttactcaatcatgaatgtaccggagtctgcaacattgaccatctcttatattggatataaaacggtaaatatctctgcaaaggataaaaatacggcgaaaatcacgttggtagaagatagtaagatgattgatgaggtagtagtggtgggatatggagttcagaggaaaagagacgtctctacttctatttcttccgtgaaagctgaacaaattgcggacgtttctgcttcagactttcgtcaggcgttggcgggtaagatgccgggggtacaggttacacagccaagtggtgatccggagggaagtgtaagtatccgtgttcgtggtatcagtacggttaatgccggtagtgatcctctttatattattgatggcgtgccggtagaacgtggatttgccaatctgaataataatgatgtcgaatctgtggaagttttgaaagatgcttcgtcggcagctatttatggtagtcgcggttccaacggtgtcattattatcacgaccaagcagggacaatcggaaaagatgaaagtgcagtatgatggatattatggcatccagagtgtttcgaagaaactttcaatgatgaatgcatatcagtttgccgaatttgcaaaggatggtcatgacaacgcttatctggatgctaatcccggagggtcaccggatgacccgaacggaatgcgcccgaactcatgggaacgtattcctaccgaactctttccctatctgaatggtgataaggggttgacggatacggattggcaagatgctatttttcgtactgctgctactaccagccacaatgtttctatttccggcagaggaaaaacagtcggctatttcatttctgccaactattatgataaagagggtattataattaattccgactttaagaaatatagtatgcgtatgaatttggacgggaaatataaaagactgaaatttggtttgaatttttctccttcctattctacttccaatcgggtagatgcttccggatctaatggtattgtgcaatcggcattgatgatgcctccggtatggccggtgtataatgcggatggcagctataattatcagggaaacggctattggagaattggaaatgactatcagcataatgccgtattgaacccggtagccatggcaaacttacaatcggatgttgtagaccgtatggcgattgtcggaaaagtttttgctgaattggagttgtataaggggcttacttataacatttcttttggtggcgattattatggttcgcataatgaccaatatcgttcttcggaacttcctttattgggacaaaagtattatgatgtaaagtcaaatccgacagcctacagttcatcaggtttttatttcaactggttggtggagaataaaatcaattataacacaacgattaaagatgctcattccatcaatgtggtcttagtacagtcggctcaaaaagagacatataaaggagataatgtgacggcgaccgatttcccgaacgactatatacaaacaatttccggaggtacggtgacgaaaggtgcatccgataaaacccaatggacgattgcttcttatctggcgcgtatgcagtacagctataaaggtaaatatatggcttcggcggctattcgtgcagacggttcttcccgttttggcaagaataatcggtggggatattttccttcagcttctttggcgtggagaataagcggagaagacttctttatgaaggctaagtgtctgtcgtttgttgatgatttgaagttaagagcgagttatggagtgaccggtaacttccagattggtaattatgatcatttgtctctgatggctttggataattatgtgcttggcacaggtaacggacaattggtgaatggttataagccaagtaccataaagaatgaagatttgagttgggaaaagaatgcgatggtgaatgtgggtgttgatttgcagatgttcaaaggattgctgggattaactgtggattattataataccaatacctctaatatgttgttgaatgtaccagttccccacctgaccggatatagcactgcattgatgaatatcggtaaagtgaataataggggatgggaagttgctttgacctcacagaagaatataactaaagatttcggttattcgtttaatgctaattatgccactaatacgaacgaagtgaaggcactcggtccgggtaatgctcctatcatatctaccggtagcgtagatcatgcttattacataacgaaagtcggtgaacccatcggatgttattatctgttggtgcaggatggaattttctccaatgaagaagaattaaaaaagtatcctcatttcagcaatacccagccgggagatttccgctttgtggatgtagacggggatggagtgatggatttggataaagatcgtacaatcgtgggtaactatatgcccgattttacctatgggtttggtggtaaagtctggtttaagggatttgaccttgattttaattttcaaggagtatatggtaatgagattctgaatctgaatcgtcgttacattgataatctggaaggtaataccaatggcaccactatagccttgaatcgttggaaaagtccggaagatccgggaaacggtcaggtgaatcgtgccaaccgtaagtcaaaggggtataatggtcgtacttcaacctggcatctggaagatggttcttatctgcgactgcagaatgtgacactaggatataccttgccgaagaacctgactcaacgctttttcgtggaaaaattaagagtttacgtttccggacaaaatttatggacttcgactaattatagcggatataatccggaagtaaatgcacgtccgagtaattctctttcaccgggtgaggattatggaacttatccattagctaaaacattcttgtttgggctaaacataacactttaatcatcctttaaaatacacgttatatgaaaaaatataaactaatactattcctatcaactgccttgttatcagttgcttgtacagatagtttcttcgatttggaaccgagtagcagtgtgcctaccgacaaggtatataagacagcggaagattttaatgtagctgtgataggatgttactccaaattgcagacacaagtttcctattttacagagtgttgcgaatatcggagtgataatttgacattgagtgcgcccactgccggaacacaagaccgttatgatatcgatcagtttgcagataaagcctctaatggaattttggaagatgcctgggcaaactttaataatggagtctatcgttgcaatcttgtattagatagaattgatgaggccaacttcgacgcaactctgaaaaaacaatataaaggcgaagctctttttatccgtgcccttacttattttaatatgtatcgtttatggggagggataccgatgactaataaagtggtgacggtggctgaagctcttaaaatcgggcgcagttccgatcaacaggtttatgattttcttgtcggtgatttgaatcaggttattaatgaaaatatgttgccgtcttcttatacaagtgccgatatgggacgagtgacttccggtgctgcaatggcattgctcggcaagatttacctgactttccataaatggacggaggctcgcaatgtgctatctcaactagtgggtcggtattctttaatgactactcccgaacaagtgtttgacgtgaacaataaaatgaatgatgagattatttttgctgttcgctttaataaagatgttgaaggagaaggacatggatattggttctctattattaatctgactgatgataccaatcagacaaagtctctgaaagagtgctacaaagatggggataagcgcaagaatctgattacctatgtaaaggtggaagataaagtatgcgtgatgaataaatttaaagatgtcaaaagtgcgacctataatacagtcggtaatgaccagattattctccgttatgccgatgtgctgttaatgtacgccgaagctttgaatgaaatcagttatagtaatttgcagaattcagaagctatggttgctttgaatgctgtgcatactcgtgccggattgtctccgcttcagataacagagcttcccgatcaggatagcttccgtaaagcgattatgttggaacgtcagcaggagtttccttatgaaggacagcgttggttcgatttggtacgtatgggaggtgctaaggaggctatgaaagcagaaggacatactattcaggactatcaattcctgtatcctattccaaaaacggagttggaaagaataaacaacacagaactgttgtggcagaatacgggatattaataggattaaactaaaagaaatcaaacgatgaaaaaaatactatatagcttgttgtttattttcacggtagtctttactgcttgtgaagaagatctgccaaaggcaagtttcgatttatatgaactgaagtcactaacggcaacagccggagatatgaatgtgactctttcctgggaagcatacgagaatgcccgtccgaatgaatatttgattctttggacttccggatcatcagaagcggaaggaggcgagatgactgtggatgcaaaaacaatgactgccactatcaataatctggtgaacgatgttgcttacactttttctgtgcaacctcgttatgagggaggattggccagtaaaactactgctgcctgtacaccgaagaatgcaagatatccgatttctgatctgacggcagcagccggcaatgaaagagtgcgtttgagatggacgaaacctgcgagtgaacgtttcactcgctatcaggttaccgtgaatcccggtaatcagattatcaatctggatgatacttcattggaagaatacatcgttgatggtttgactaacgatcaggaatatacatttaatgtagcctgtgtttatcctacaggcaattctattgcggtggaaacttctgctactcccggattgatctatcctattctcgctagtacggaactggttgtgtgggagccttctacctttgcttataacgatatgtatttcatggctggtgaagtgaaatcggtaagttgggattttggtgatggtacgacatcgggagaaaacaatccggtgcatgcttttactactaccggtacttatacagtggctgtaacggtgacttatgttaataataccaccgagtcgggcagtctgactgtcacggtcggcaattataaatggaattctgtcgatttgaacttcggtggacttaccggatatgtaaagacctccaatccggtgttctctccggatggaaaaacaatgtatatcccgacatctactcctgcgggtcatttatttgctattgacgtagtgagcggtgaattcaagtgggtgtttgctatcagtcagataacttatggcggaggtgcgttggtggctcctgatggtacaatctatcagtgtgtaagaaatgccactattaataatgtatatgctattaatccgaacggaactcaaaagtgggcaataaaattggatgctgcgataggagctttccctgcattgtcggccgatggtgttctttactgtctcaccaataagagtacgttgtatgcgctggatgcatccagtggtgctattaaatggcaacaatcgcttgacggagcaaccggtagtgctgtggctattgataaagccggaaatgtttatgcaggtacaagtgcagccatttattcttttaaatcgaataaagagcagaattggaaattggaagaagtgaatgtgacagaacaggctacgtttgctttgaaggatcaggtactttatgcgactttgaaaaacggaggactcgttgctgttgatatgacaaacggaacaaagaaatggacgtatccgactacaaaaggagatgcttatttcccgattgctgataaaaatggcaatgtctattttactgaaaaaggatcgcagactgttcatgcagtaaatgccagcggatctaaaatctgggagaaaaatgtgggtaacaatttgaactacagtggaggtgctttgagtacggatggtattctttatataggtacccaatcgaataacaaagtgctgggacttgacatcactaatggaaacattgtttttgaagagactgtgggacaacaggtcatggcagctgttagcattggtccggacagacggctttattgcggaacgatcggatctaataatatcagttcgataaaggcttttgctgtcaataagacattagcaacagactcctggagtattcgtggtggtgatattcaaggtacaaaccgtcaaaagtaagcgataatgagagttcctgtttttatcttatttatggcgatgacaatgggtttatatgcacagaaatataaagtaggtacgactacagctttgtggaaagtacctgcttccacagacttttctcaagcccggtctgtgggggtagagtatgtggaagtagcatttaaccagtgttatagaggagttccggcagatgaagttgttcctcgtatccgggatatgaaagcaaaaattgatagtgccggtatcaaggtctggtctatacatcttcctttctcacgcacgttggatatatcggtgctggatgaaaagaaaaggaaagaaaatgtagattttatggcggagatgattggacagtgcgctcagtttcagccgaaatgtttggtactgcatcctagttccgagcctattgctgacagtattcgggcacaaagaataactaacgcttccaggtctatcgcttatctgaaaaaatatgcggatcaaataggagcacagttgtgcatcgaaaatctgccgagaacttgtctgggtaatactcctgaagagcttttggaaataatcaaagatactccgggtgtgaaggtttgttttgataccaatcattatactaaagggacgacagggcattttgtagaaactgttggtgaacgtataggtactatacacgcttcggactttgattttgtcaacgagtgtcattggcttcctacacaaggtgacattcaatggggaaagttaatgcatgcactcgaaggaatcggctatgaaggggttttcatgtatgaagctaccaaagaccatgaaaacgacaatacgcgtccgacaccggaacgggtggttgagactttcaataaaataattaatgactataaaaatcagaaataagatggatataataagaaaaatacaatatttactgttttgtcttttggcaataggttttgttgcttgtgatgatgatgacaacaacagtaccgaaactggtcatgaaggaattcttacgcaattggcagaggaagtagatgccactgcacaacagttgtggagttcttctcctttgattgtcaataccggacgtaccactactttgaccaagatccagggatatgcggataagtgtaaagatgattatttcatcagttatctgaatggcttcgatcaggcaagtacgagtatggaaaagtgtgatccgattatctatttttatcggagtgcatttgatcgtgtaatggatggaattaaaaactcaaaagtagaaaatggtacggcagcgatctggttactctataatatggggtatgtggtaaaaactccgtcaggatgttttgctattgacatttctcatcgttgggcgaaagagctggcaccttatattgattttctctgtgttacacacaagcactccgatcattatagtaatgatcttatccaggctatgtttgatttaggtaaaccggtgttatccaactatttgaaagacacgacatatccttatactgcaaagggggataaagattatgaaattggaaaattcaagattaaaacctgtatcactgaccataacaatgccgggttatctaattttgtgactgtgttttcgatcaattgtggggaagataccggtaatttcgtttttatgcatgtaggagactctaactataaaccggaacaatatacgaatctggcttctcatgtgaatgttttgataccgcgttatgctcccaatgctctgaccgaaaataatattctgggttcaggtgcgggacaggtggagcccgattatgtcttgttatcacatatcttggaactggctcatgcaggtgttgatgaatcaagatggtcattggatatggcactcgaacgggcttcgaagattaactgtgaacagacttatgtaccaatgtggggagaaaaactagtctggaaaaacaataaactgaattaaaattcttaatgcttgaacttatgaaacggatatgtaacttcatacttcttctgtgtttggtgcaactggctgttgctcaaaatagaatagctgaaatcagagaaaatctgctgggaaatcatccagataaaatattggttgtatcccaccgggctgactggcgtaatgccccggaaaactcattgcaaggtatacagaattgcattgatatgggtgtcgatatggtggagatcgatttgaaacgaaccaaagacggacatttagtagtgatgcatgataaaacgatcaatcgtaccatgtctggaaaaggactggtggaagattatacattggccgaattgaaagcaatgcgtcttaaaaatggagtagcttgtaagacaagacatcagattcctacattggaagaagtgatgttgctctgcaaaggtaagatcatggtaaatattgataaggggtatgattattttcaggaagcttatattgtactcgaaaagacgggaacggttgaccagtgtgttatcaaagccggccttccttatgaacaagtgaaagccgaaaacggtgctgtattggataaagtgatttttatgcctattgtacagttgcataaaaaaggagccgaagctattattgacagttacaagactcacatgaagcctgctgcttatgagttagtgtttgataatgatagtcctgaggtgcttaacctgataaaaaaagtgcgtgatacgggttctaagttgtttataaactctctttggcccgaattatgtggtggtcatgatgacgaccgtgcagtagaacttcatcaaccggatgaaagctggggatggatcattaatcagggagccaaattaattcaaactgaccgtcctgccctcttattggagtatctgcgcaaaaagaaacttcacgactaaatagactttttcatgttgaaacaacttataaacttttacaaggtctcttcaccgagaccttgtaacggggaagctttgtcttcatccggctcacaacatcttcattccgatgcccgtcgtctgaaatacctgaaatggtctactttcctttcagccactttcggttacggcatgtactatgtttgtcgtcttagcctgaatgtcgtgaagaagcccatcgtagatgaaggaattttctccgaaacggaactgggaattatcggttcggtattgttctttacttacgcccttggaaaatttacgaatggttttctggctgaccgtagcaatatcaaccgctttatgactaccggtttactggtaactgctttagtgaacttgtgcctgggttttacccattcttttattctgtttgctctcctttgggggattagtggctggtttcagtctatgggtgctgcttcttgtgtagtgggactttcccgttggttcacggacaaagaacggggttcctattacgggttttggtctgccagccacaatatcggtgaagcgttgaccttcctaattgttgcatctatcgttagtgtattggggtggagatacggtttctttggtgccggtattgttggtttgcttggtgctttaattgtgtggaagttcttccatgacactcccgagagtcagggctttcctcctgtaaatgctccaaaacagaaagaggagatgagtgtggtggaaacgacagactttaataaagcccaacgccaggtattgatgatgcctgccatctggatactggctctttcgagtgcttttatgtatatcagtcgctatgctatcaatagctggggtgttttttatctagaagcgcaaaaaggatattccacgttggatgccagcttcattatttccatctgtccggtctgtggtatcgtaggtaccatattttcgggtgttatttctgacaagttatttggcggtcgtcgaaatgttcccgccctgattttcggattgatgaatgttcttgcacttagcctgttcttgttggttcccggtgtacacttttggatagatgtgttggctatggttcttttcggtttgggtatcggagttctcatttgttttctgggtggcctgatggcagtcgatattgctccccgtaatgcgtcgggagcagcattgggggtagtcggcattgccagttatattggggccggattacaggatgtaatgagtggtgttctgatagaggggcaaaagacggttcagaatggagtcgatgtttatgatttcacttatatcaattggttttggataggagcggctttattgtctgtatttttcgctttattggtgtggaatgtgaagccgaagtaatgatttgaataacaatgctttataaaaagggacttttcccttttaaaccaacgggtcgtttcttttaaaggaacgacctgtttcacaccgagaaacaacatgttccttttaatgaaacgcaaacagtttttcagtattatttcagtatcatgctttttctttgccggagataatttgttatctttgtaactttaacccgaaaatcaatgagtagaataatattaaatactaagacttggctattatttgtgctgttgtttggaatatcattttctgcatgggcacaaagtgacgattttaatacatggactaaattcaaggtaaaccataagatagattcccggttttcagtttcaggtgatttggaattgcgcatgaaagatgatgtgagtaaattggatcgttgggggctgactgttggcggaagttaccgaccctattcatttttgaatctgggggttggctatgaaacccatcttcggaatttgggtgactcggactggaagttcaggcatcgctatcatataactgctactgtcagttttcgttatcaatggttgaaagtagctgtaagggaaagatttcagcagacttttgatcgtggcaactctgaaactcgtttgcgttcccgcttgaaattatcttatgctcctacaaaaggaattgtttctccctatttctctgttgaaatctatcagagtttggatgacgtttctttttggagagccgatcgtatgcgttatcgtcccggagtagaaatagctttggccaaacgttggtcgttggatgcattctattgttatcaatatgcatcttcgcaaggcagacacattgccggaatagaagtgggatattctttctgaaattagcaggctcttaatataataatgtgagagtttaattctttgttcctgactagtcgtttgtaacttgttgattgtttgcgttatagatgaaaatgtgaaattttcctatagaaactatactccgacttaatataattatatacttttgctttcaagacatcaaaatgatatcttgaaattgatgattcctcagtacaacagacgtgttgttcagtatcccataaccgaaagcgaatacttcctcttatgctattctttctgttcaatcaaaagtttctattggaaaattaaaaaataaatatgatgaaactattttataacctacaaaggggcgtgggtttacttgttttttgtactatcttgcttagtgcttgtgtgaaccatatttcggaggaagaggaggatagtgttaataatggagatattccattgaaatttattgccgatattcgtgaatcagttggtacccgtatggcaaataataactttgctgaaggggatgaagtcggtctgtttgctcttgccggaaccactacaatgcaagaagaacgttatgtggataatcttcatttcatacgttcatccaatggtgagtttgaatctaacgagtcggtatactatccggatgatggagttacattgaatttaatcagttattatccttatcaaaagagtggcgtggggataggggagagcaccatgcaggtggcggtttcaacgactcaaaatattcctgacgattattcacattctgatttcctaattgcttctaaagaagaggtcttagccagtaaggaggcggtcgctctgacctataatcatcagttttttcgtctgaaaattgttcttattcctggagagggggagaatttggaagatatgttatccgttaagcctacgctttcggtgagtggcttttatactaaaacaagttatgattttcagaaaaagactttctctggttattccgaagagaaagatattattcctgcaggagaatgggagataaaagacggacgactgataggaaaggaatttattttgataccgcaggaggcgactccgggataccaatacataacgttggaagctgcaggaaagctatatataagcccattaccatctactttacaattaaaaagtggaaagcagcgcgaattggaaataaagtttgtatcagccgaagatgtattaatgagcaaagtgaatggggaaatcggagattgggacggaaccgaaatagatcatacagaatcagtcacgcttcataaatacatagatgtttcgaagttaacttttgaaaagtcgaatgtgtataaagtgttacattcgggaaagcaagtagctgaaatatgtaaggagtatcttgttactccggaattttcttcgcaggcaatcgttgcctatccgatgaaaaaagatggtagtgtggacttatctcaaggtgttgtagcacagttgctagggaaatccggaaaagtgaatggaggaagcgtatcatggaatatggaagattactcattggcctatgttgacggaattttgccgattcgtaataatgtatatgtgatggcaaacggaaccgtttctttatctgttacgacagcagatgacgtactatctgttttggctttggaagatatcgttcgtgatgtacgtggaggaatcattcataattatccgttagtgaagattggaacacaatattggatgcgggataatctggaggcatcttcgtatgttggcggtgaagcacttcccagactggatgcagtgacagcgaatgttgtcggatatctgcaatctactacggaacactatttttatacagctaatgtagtactttctaataaaattctgcctgctcattggagtataccggattggaaagactggaacattttaaaagactatctgaatggagaggcttctttgctgaaatcaggtacttggttacctttgaaagcgggagaacaggtacagcctgcaactaatttatccggttttaatggaatacctgtaggaatgtatgtgggggcttttcaaactgattacgagaaaaaacatctggcatattggacactggataatgcaaatgccgctatcgatatcaaggttttctatctgaaaagtgatacggatatcattgaagaatctaatgcgggtgttgatacaaaagcctttgccattcgttgcatcagaaagtaaatcgacgaaaaaggcttctcttttccataaattgcttatatttgggaagtaaaactaactaaaagagagaactatgaagaagataataaatccctggaaaggtttggaagggtacaactgctttggttgtgcttccaataatgaagccggattaaaaatggaattttacgaagatggtgacgaagtggtaagcatttggaaaccacgtcccgaatatcaaggctggattgataccttgcatggcggtattcaagctgtcttgatggatgaaatctgtgcctgggttatacttcgtaaactacaaaccacgggggtgacgtcgaagatggaaactcgttaccgaaaatcgattgataccaaagattctcatatcgtattacgcgcgtctattaaagaggtaaagcggaacatcgttattgttgaagcaaagttatataataaggatggagaagtctgtacagaatcagtttgtacttactttactttctcgaaagaaaagtcgaaagatgaaatgcatttttcgaaatgtgatgtagaatcggaagagatattaccattaatttgaaataaaaacttaagtttttgtgataaatgtttggtagtatcaaacaaatactttacttttgtcgcagttaataaaagaaatatgaaatatacagctacacatcatcatcatcattttcctaacgaataatcggtgggcgtggatgatattgtgtataactatataaacgataacgaaggcttaccgaatgcggtaagccttttttgtttttcaacgcagattgtatttgtaattaataattagtaattaaataaagtcatgttaagaatcgcagtacaagccaaaggacgtctcttcgaagagacaatggcacttttagaagagtcagatatcaagttaagcactactaaacgtaccttgttggtacagtcttctaactttcctatcgaagttctatttcttcgtgatgatgatattccgcaaacggtagctaccggggtagctgatttgggaattgttggtgagaacgagtttatggaaaaggaggaagatgcggaaattgtcaaacgtctgggattcagcaaatgtcgtctgtcactggctatgccgaaggatattgaatatcccggtttgtcatggtttgaaggcaagaagattgctacctcttatccggttattcttcgtaacttcctgaaaaaaaatagcgtaaatgccgaaatacatgtgataaccggttcggtagaggtgtctccgggtattggattggctgatgccatttttgatattgtaagttccggttctactttggtcagcaaccgcttgaaagaagtggaagttgtaatgaagtcggaagcattgttgattggcaacaagaacatgagcgaagagaaaaaagaagtgctcgaagaattgctgttccgtatgaacgcagtaaaaacagctgaagataaaaaatatgtattgatgaatgctccaaaagacaaactggaagaaatcatagctgtattgcccggtatgaagagtcctacagtgatgccattggcacaggaaggctggtgttctgttcatacagtacttgatgtaaaacgtttttgggaaattatcggaaaattgaaaggactgggagcagaaggtattttggtactgccgattgaaaagatgattgtataaatagataggaacgaaaattcgttcctgataaaatatgaaccatgaaattgattaaatatccctcaaaagagcaatggacagaacttttgaaacgtccggcactaaatacggaaagtttgttcgatactgttcgttctattataaataaggtaaggacagaaggcgataaagcagtattggaatatgaggctgcttttgataaagtaaccttgtccgcacttgctgtgactcctgaagaggttcaagccgccgggacattagtaaacgatgaactaaaggctgccatttctttagctaaacaaaacattgaaacattccactcttcccagcgttttgtcgggaagaaggtagagacaatgaatggggtaacttgctggcaaaaatcagtgggaatcgaaaaggtcggcttatatattccgggtggaacagcaccgcttttctcaactgtattaatgttggctgttccggctaaaattgcaggatgcaaggaaatcgtactttgtacgcctcccgataagaatggaaatattcatccggctatcctttttgctgcgcaattggcaggtgtcagcaaaatattcaaggctggtggtgtgcaggctattgccgctatggcctatggaacggagagtgtccccaaagtatataagatatttggtcctggcaatcaatatgtgacagccgccaaacagttggtaagcctgcgtgatgtagctatcgatatgcctgccggtccttcagaagtggaagttctggctgatgcatctgccaatccggtttttgtggcagcagatcttttgtcacaggcagaacacggaatagatagccaggctatattgattaccacttccgagaaactgcaaacagaggtgatggcagaagtggagcgtcaattagcagaacttccccgtcgtgaaattgcggcgaaatcactggagaatagtaaattgattttagtgaaggatctggatgaagcattggaactgactaacgcgtatgctccggaacatctaatcatagaaacggaaaactatatggaagtggccgaacgtgtgataaatgcaggttctgtcttcttaggttcgttaactcccgagagtgccggcgactatgcttccggaacgaatcacaccctgccgaccaacggttatgccaaagcctatagtggtgtaagtctggatagttttatccgtaagattacatttcaggaaattctcccggaaggaataaaagctatcggtcctgctattgaagagatggcggctaatgaacagctggatgcacataaaaatgccgtcacagttcgtctcaaagcaattcaaaattcataatttaaaacttaaagaagtgaaaacgttacaagaactaacccgaccgaatatctggaaattaaaaccctactcttcggcacgagatgaatataaaggagttacagcctctgttttcctggatgcaaacgaaaacccttacaatacgcctcataaccgctatccggatcctatgcagtgcgaactgaagacgttgttgtcgaaaatcaaaaaagtatcccctgaacatatttttcttggaaacggtagcgatgaggccatcgacttggtttttcgtgcattctgcgaaccgggaaaagataatgtcgtagccatcgaccctacttatggtatgtatcaggtttgtgccgatgtgaacgatgtggaatatcggaaagtattactggatgatgacttccagttctctgccgataaactgctggcggctaccgacgaacacaccaaattgattttcctttgctcgcctaataatccgacaggaaatgatttgctccgttctgaaatagaaaaggtgctttgtcagttcgaaggattggtgatgctggatgaggcttataatgatttttcccaggctccgtctttcctcgaagagctggataaataccccaaccttgtcgtattccagaccttctccaaggcttggggatgtgctgcaattcgcttgggtatggcttttgcttccaaagaaattatagacattcttagtaaaatcaaatatccctataatgtcaatcagttgactcaacaacaagctatttctatgttgcataagcactatgagatagaacgttgggtgaaaacgttgaaggaagagcgtgattatctggaagcggaatttgaaaaacttccatgtaccattaaactgttcccgtccgatgcgaatttctttttggcaaaagtgacggatgccgtgaaaatctataattatttggtaggggaaggaataatagtgcgtaatcgccataacatttcactttgctgcaactgtttgcgtgtgactgtcggtactcgtgtcgaaaataataccctattggcagctcttaaaaactatcaaggataatttatgaagaagaaagtattatttatagatagagacggcacgttggtgatcgaacctcctgtagattaccaactcgactcattggaaaaactggaattctatccgaaagtattccgtaatttgggctttatccgcagtaagctcgattttgaatttgtgatggtcactaaccaggatggattgggtacaccttcttttccggaagaaacattctggcctgcccataacttgatgcttaaaacattggaaggggaggggattacttttgatgagattctgatagaccgtagttttcctgaagataatgcgcccacccgcaaaccgcgtaccggaatgttgacgaagtatctggataatccggaatacgatcttgccggaagttttgtaataggcgatcgtcccacagatgtggaacttgccaaaaatatcggttgccgggcaatttatttgcaagactcgaccgaagctctgaaagaaaaaggattagaagaagtctgtgttcttgcaactactgattgggatcggatagccgaattcctttttgccggagaacggaaagcggaagtacgtcgtactacaaaagaaacagatatttatgttgctttgaatcttgatggaaatggaacttgtgacatttttaccggtcttggctttttcgatcacatgcttgagcagattggaaaacattctggcatggacttaaccatccgtgttaaaggagatttggaagtagatgaacatcatacgatcgaagacactgctatcgcactgggcgaatgtatctatcaggctttaggtagcaaacgagggattgaacgttatggctatgccttaccgatggatgattgtctttgtcaggtttgtctggactttggcggtcgtccctggttagtttgggatgctgaattcaagcgtgagaagataggagagatgccgacggaaatgttccttcatttctttaagtcacttagtgacgcggcaaagatgaatttgaacattaaagcggaaggacagaatgaacatcataagatagaaggaatttttaaagcccttgcccgtgctttgaaaatggcaattaaaagagatatctatcattttgaacttccatccagtaagggtgtgctttaatgttttttagaatcatatccatattgcttatgcaaaagcaaatcccactatgcttattggcgatagtcttatccgtctctcttttcggtcaaaatctgaaagcggataagattattctgcctgatagtgatttgacaaatttgtatcaaatagattcgggcgtatatcgttcggagcaaccttcaaaagagggctttaaagctttagaaaagtatggtattggagaagtacttaatctacgaaacagacatagtgatgatgacgaagcaaaaggaacaagtataaaacttcaccgggtaaaaactaaagcacattcgattagtgaaaagcaattgatacaggcattacgcattattaaaaatcgtaaagcgcctattgtttttcattgtcaccacggctctgaccgtacaggggctgtttgtgcgttttatcgtatcatttttcagaatgtttcaaaagaagatgcaatccatgaaatgactgaaggaggctatggctttcatcgaatttataagaatattattagaagaatcaaggaagcaaatgtggagcaaataagaaaagaagtaatggaaggtggagagttataatatgccatatctttaccatcgctctgtcacagctgtgccaccgtattgtcacaaccatgccatcatgctggcacagttgtgccaatgcggtggcacaagcctattgataggacgtccttacaaggcctctatttctttaagccacatggctgaactggcatcgctcggcattctccaatctcctctcgggctgatagaaatacttcctactttaggaccgtccggcaagcaagaacgcttgaactgttgattaaagaaacgacggaagaaggtagaaagccatttcttgatggttttttcatcatacatatctttgaatgcaatatttgccagatagaatatcttggaaggccggaaaccgaaacgtaagaaataatataggaagaagtcatgtagttcataaggacccaccaaatcttctgttttctgtttaatttctccgttttcatctgccggaatcagttccggactgatgggagtatctacaatatcgagtaaagtcgctttcgaattttcatccatgccatttactgccacccattgtaccaagtattttacgagagttttagggacactcgcattcactccatacatggacatatgatcgccattatatgttgcccatcctagtgcaagttctgataaatctcctgtaccaataaccattccccaagtctggttcgccacatccatcaatatttgtgtacgttcgcgtgcttgagaattttcgtatgtgacatcgtgtacattaatattatggtctatatccttaaaatgttgaatgcaagcatctttgatactgatttcacgaatagagatacccagcgatttcattagatcgatggcattatgataagtacggtcggtcgttccgaatcctggcatcgtaatgccgagaatatcctttctggacaatcccaacttatcaaaagtcttcacacatacaagtaatgccaatgttgaatccaacccgccagagataccgattacagcagttttagctcctgtatggacaagcctttgtgccaatcccgctacctgtatggagaacacttcttcacaatgctcatttagctctattccttgcggtacaaaaggatgagaattaaacttccgggttaaggttagctctttgctgttgacaaattcagtcgcaatagaaaccgcctttttatcccctaagtttgcttgattagctgcaaaggttgtatttatcctgcgttctgcccggatacgttccacatcaatttcgctgataatcagctgttctttcatgctgaaacgttcgctgtgtgcaagcagtgaaccgttttcataaatgaacccgttaccggcaaatactacatcggtagtagattctccaaagccacaagacgagaatacatatccggcaatacaacgtgcagattgttggctgatgagagaacaaagataattattctttccaataccttcattatcagcagacatattgaaaagaatttctgcaccttgcagtgctaatgaagaactcggaggtatagtagaccaaaggtcctcgcatatctcgatgccaaaagtcgtatctgaagtctcaaaaagcagattagaacctatcggaacgatttgtccacagagacgtacactatttgttgtcaactgaagcgccgaagtaaaccagcgctgttcgtagaattctttataattcggcagataggtcttggcggcaactcccaacactttccctttctgaatcactacggctgcattgattactgtcgaattgacaccgacaggcataccaacaatagaaatgatgtctaattggcgagtgttattcagaatttgcatcagccccatttctgcttcttccagcaaaagttgttgtccgaacaggtcgccacacgtatatcctgtgatactcatttccgggaaaataatgatctgcactccttttccttcagccactgcaatcagactttctatcttctctacattgaatttacagtcagccacttttacgtgtggcacggctgcagctacttttacaaatccgtagttcatcttataccttatttatatataatgggtgcaaaaataggaaatacttttgaatatctatcttttttgcattgaatcctctcgataagctattttgtgtgagatatggcattgttgtttaaacaattaaaataactatcaaaatgattgttaatgtcaggtttatattgaaatatattgtgtatttgtttcttaaatgagtaatatatgcttaaaaatatagcaaaaagatataagtggaaatatggtataaaatatgcgacatattgtttcttttatttaaatataatatatatatttgtagccgaaaaagaacgatattggaagtatataacacctaaacagaacaagtgatattagtgtttaatttataacttaagagagcagatggtcatacgtttaattcacacagcagtaacacgaaaaaattatttggatatttggcgcaatattaagaatttgccaagttagtctattcctattctatatttatagataataatagcctatcccgggtcggtgtagaatatgcttaaagccgattttggggaaggagtgtattactattccatatgcgaagataagcgtattcctaattgtcctcaaatccgcaactacgcgcctaatatgatacagaagcgaaaagaatctgcatcgttagtaaaaagggggcacagtgcatcgaatgtcaccataaagacatataaatgccccttaccccaccatgcgacttgaggcaatacgcaaaatcacgactataagttgtcggtgttatccaaagtcattctggaacacattggcataagcattgttgcatgaatagatattcagcacatacttccttgatgtcctgacccatttggctggcacagagatgaacttaaagacaaacgtcttgatgcggcttgttgctttgagtccgaacctcttcacgtcaagcctcgccatgatgaatttatagaagttgcgtatgagtgccataagcagaagaaacaccgtgttttctcccataaaggattttggaagcctgttccagccgaatccgttattcatatcatcgaagatgcgttccttccctccacggaggttatagaattcgacaatctctttctcggaagactcgtagtcatttgtaaggatgcagcggtaggtgtattctccttcccacaggtcgagttcgccgtctatccgcttctgtctttgaatcacaagacggtatgccttccctttccatttctcgatgagaatggaggccagctcaaactcaatgccgcccaattccactttcttccaacctctgagggcaaagatgtcattgtagagcgaactgcatcggttagcacggatatagaaggtcttgcagtgtttagcaatctcttccactatctcttcagaacacgagccgcaatcagctctgaaacggttgataataagcttgttttgttcaaacctttcaaagaacctcttcagcgtgtccttctggtggaaacggacatttgtgttgccgtcgctgttctcaatgccgacaatcaagttgccaataaccgccacgccagggcgataaccaaggaacttcttgtatgtaggcttcgcatcaaacttctcagcctctatgaactggtggtcgaagtcaacgtcatacccctcgccctctttcagctgccctgtggacaataggcaattgaggagcagtgtattcagcttgtctgccgtgttgaagtcgtaggtcttgccagtgtcggatgtgtaggaaatgttatcctgggtcagttcctttatggctctaagaatcgtgtcggcactgcatgtgcgaagtgtcggatgaagcgaaaggtggtacatcagatgagtggtgacatcctcgatgcatgagccgccacaaaaataaacgctcataagcgaacggatgatttcgctgtattgataaccatacagcctgcatctcataccgagggttgagtcgattacagatgagagtctggagtcaaattgctccattattgaaaatattcctccaaaaggagtgagtttctcggatttaattgctacctttgccatgtctgtcgggtttgatacatattttgatttgcaacactaagataggtgaaaaatctgacatggcaaattcctgagcaactttttgttgctcaggtacttaaaaagttatatttgtaatagtgttgcggaattaaggattgtagataaatctataaaaataaatcaatttcattaattttaattcaagtatcaaagatgagaaaatcaattctcttgtttgtactctttactctgacaagtatccccctgttgctttttgcgcagggtggatatcaggtaaccggacatattatttcggcggaagataatcagccgatgattggtgtgtctgttttggagaagggtacgacgaacggagtaattaccgatatgaatggtaattacagtatcacagtgacgaaatcccccgctattttgcagttttcttacattggaatgaaaacgatggaaaagcaggtgtctgctgccactcgtattgatttgaagatggagagcgatgcgcagatggtagaggaagtggtggtcgttgcctatggtacacgtaagaaaggaacgattgccggtgccgtatctactgtaaaggcagaaaaaatggaaaatgtacctgcggccggtttcgaccaatcattgcagggacagacccccgggttaacggtaatctctaattcgggggaaccaagtaaggcggctgttttccagcttcgaggtaccaattctatcaattcgggtacatctccgttatttattttggatggtgtgcctatttccagtgctgattttaatacaatcagtccgggcgatatagagtctatctctgtgttgaaagatgcttcatccacctctatttacggtgcccgtgcagcgaacggtgtggtagtaatcacttccaaacgtggtttggcgattgacaaggcgaaagtaaccatgcgtgcgcaatggggtttttcacaattggcttcagacgacaattgggtagtgatgaatactccggaacgtatccagtttgaaaaagaaatcggtttagatacgggaaaggattataacttgttgtctcgtacgaatgtaaattggctggatgaagtattcaatgaccgcgctcctttgcagagttatgaattgtctgttaatcgtgctaccgaccgtttgaattattttgtttccggaggattctatgatcaggaaggtattgcccagagctctaattttcgtcgttataatatgcgtgctaatgcggaagtgaaagctagcaactggctgaaaataggtactaatacgatgatggcatacgaagaaatagcacaggctgaagagggagaaccggcactttatacacctatttccggttcgcgttttatgttgccttactggaatccttataatgctgacggctctttggcttccgaaaacgatggaacctggacaggaaccggacagaacccgatagaatggatggcgaacaatcctgtaaaatatgaaaaatacaaattgttgtctactatcttcgcggaagttactccgattcgggatttaaccattcgtgcacagtttgctgtagattatgcacattctacagctttcatgcaatcttttccaagttatatcattaataataaatcaggtaaagccgggcgtagttcatcggatattcttagtttgagtgaaactcttacagccaattaccgatgggctttgaatgataatcattcattgaattttttgctgggacaagaaggtatagactatcgttcaaccggatttcaggtaactacacaaggacagaacaatgaccgtctgaccaacctgctttccggaactcgtgcgatctcgtggccggactcaaatagtgcttatgcatacctgtcttttttctttcgtggagagtataattataaagagttatattatgcggaagttgctgcacgtacagacgcttcttcccgttttggtaaagaccaccgttggggaatgttctggtcgttaggctttatgtggaatatcaagaacgaggctttcctgaaagatatagaatggctcacgaatgcacagattaagttaagtacaggtacttccggaaattcggaaattccttactatgatcatctggcattggttgccggtgatgccaactataatgatgaagctggtatatatcccaaacaaagcgggaacgaagaattaagctgggagcaaacttgggcaaacaatatcggtttgactttgggcattttcaatagagtcaatttgaacgtcgatttttatcataaaaagacgactaatatgttaatgttagttcctcaatcgtatgctattaccggtgtcggtaatcggtgggacaacattggtgctatgatgaatcgaggagtggaaattgcaatggacggagatgtgatccgtacaaaagacttcacttggaatctgagcgcaaacgtatcttataataagaataaactattggaactttataatggtgtggaagaatatgtaaattccactaccggattgaaatacgtagtaggacatcctgttcatgaatactacatgaaccgttatgcaggagtgaatccggctaatggtgatgctttgtggtacactgctgacggagaactgacaacagaataccgtgaagaagacaaagtaatgaccggtaaaaccttcgactccccctgggcaggcggcttcggcacaaccctgatgtggaaagggctttcattatcggcccagttcagctggatggctaaaagatatgtgatgaataatgaccgcttcttcgaagaaagtaacggactgtatagtgcttacaatcaatcaagaagactattgtatgatcgttggaaaaaaccgggtgacattacggatattccccgttacggagtgacagctcagctggacgaccgttttcttgagaactcatcattccttcgtttaaagaacctgacactggcttatgcgcttccgcaatcattgttgaataaaactcatttcttcacgtcagcacgtgtctatttgcagggacagaatttgtttacttggacaggttttacaggacttgatccggaagtggcatctaatgtatatagggcacagtacccggcttcacgtcagtttactttgggtattgacatttcattctaatagtataataaagaaagatgattaagaaatttaaattatatatcctgatggctgctgtggctctttccgccacttcctgtttggataagatgccggaagactctattccttttgatgatgccattcagacggtggatgatgtaaatctggcagttatcggtatttacgacgcattcaagaatagtgctctgtattccggtaatctcacgatacttcctgatttgcagaccgatcttgtgtatgggatcaacggaaatacgaatacatacggagatatctggcgctggaaagacattctggcaacaaatacaagtatcgaggctgtttatgccggactttacgatgtgatcaatcgttgtaacttcatgctcgatcgtgtagacggagtgagaaacaatacaaccgatgataatgatttggacaagcttgaccagtattgtggtgaagcttattttgcccgcgcacttgcttactcggaattggtaaagcttttctgtaaagcctacgaaagtgatgaagatgctgctaatcagctaggggttatcctgacgaaacattatcaaggcgacgaagaaatgaaacgttcttcgttgaaagcttcttatgagtttattcttgaagatcttgaccgggctgctaagttgttggagttggataaagactatgatccgtctgtagatgtggctttatttaacaatgctacttacttcaacgaatatactgtatacgctttgcgtgcacgtgttgctctttatatgaagaagtgggatgaagccatcaaatattccagtaaagtgatagatagcggatattatctgttggctagttgcactcgtgcaatttcctccggagtcagctattataagtatatgtggacaaacgacatggctacagaagctatttggaaagtgggcttcaccgtcaattcttatggaggcaaactgggattgattttcttaaattacgaccatgtgaattatcgcccggactatgtcccggctacttgggtgctcaatgcttatgatatgaatgatttgcgtgcctctactttcttcgaatcgcatacaactagttttagccatcatctttcttggcctttgctgattaagtatgccggtaatcaagatttcatagccgctaatattcttcatgtttccatgcctaaagttttgcgtctgtcagaacaatatctgatacgcgctgaggcttatgtgcaaaaggaacagccggactatggccgtgcgggaaaagatattacgacactgcgtactgcacgatattcctcttatggtggatcaactcccatgagcgaggctaatgcaatggaggttatcgagtccgaacgcgtgaaagagctttatatggaaggtttccgtcttcatgatttgaaacgttggcacaaaggtttcgagcgcaagccgcaagaccagtctttgtcaactggcgatagattgaaggtagaagcagacgatcctttatttgtatggcctattccgcagcacgaactagacgctcccggctcgcaaatagaaccgaatgaaagtaataaataagattaaaacatacgataatgaagaaattattaataggatgtatggcagccgttgctgctctgatagctttctccggatgcgatcaggacaaggtggtgtacagcggacccaattatcttatgttttctgacacgctttatacttatgccgtgcaagaaaccaatgagatattcaatgtgcctgtttctgccactgtgcctgccgactatgaccgcacttttggtgtcgaagtcatagataaggagagtaatgctgttgaaggaaagcactacaaaatcttgtcgaataccgttactataaaagccggtgagatgagtactgatgttaaggtacaaggtctttataagaatataggtattactgattcgctaggattcgctttgcggttggtaatccctgatactgaacaatggagtttatacaagaacgaggcaaaggttgtgatgcaaaagatttgtccgtttgatatcaaaaactttaagggctattgcaaagtgacttccagctatttgtcttccgattactatccgaagaaagtagatttgcgattagtgacttctgatattgtggaaggtaaagaaaacacgattgtagtccatggtctttattttgacggttacgatatggaaataaagttcaaccggaaagatgttttggaacctctcgtagaaatggaagaacagatttgtggctctaccggagaggcattcaatacgattcatggcgatggtaagttacggttaaatcagcctacggcttatacttcgttctacagtacaaatgagaattttatcttgcagtatgttacgatgagtgtgaataataaagacggctcatactacggtacggtaggaacatttgtcaatgtactcgagtggataagcgaagcggaagctgaaaaattaaaagaacaaggatattaaaaaatagcaatagataaagatatgaaaaagtttagtttaaaaccactaggagattcgtgcatgaagacattatgcaagagctggctctttattggcttacttatggctttctgccttgcggcatgttcggacgacgatgataatgcagagactccgatatttccggaaaagcagaatctcatctgcaattctaatgatacaagagagtttactttcaccgctaatacaaattggagtttggcgtcttctgctatttggtgtaagttcaagaccgacgatgaagaagaatttgttctgtccggtacggctggtacgcagacggtaacacttgtgatcactgatgaaaatatgcaggtgggcaacgttagtgtagctaaattggaactgacaatgggtggtcagacgattgtaatcggtgaagtgacccgttcgaaagtagattataaactgaagatatatgataaggaaggtaatgatatcactgaagacggagttcttaaagtaggttatcaggaatatctccgttttgatgtggaagcaaacttccgctttgctgccactaatcttccgggatgggttgaattggaaggtggttcccttgtaggtgcagttaataagaaagtacaaggtggtttgagaataatcgaaaacgaaagtcgtgaaaaatatcctgtttcggctagtgacgaaaatgtgatcacattctctgatgaagagggaagagcattccatactatcagactagcttatgagggtatgacaccaggaaaaatggaactgaaacgcccctcaagttatgctacagattgggttgtatcaatggatggaaaaacatttacccaaaaaagtacaggtggtagtacaggtgaagtagtggtgaagaaaagaatgccatttacagtaaagactctgaaagatgattttgaaattgtatttttaagtaaaggatgggacgataatatccatttaaaaggttctatgtatgatttctttacttacgaatggatacattatgaaaaggatggaggaaatttaaacttaattgttgatgactacattccgaacacaatgaatggtgaccctgatgagagaagtggatatgttctagcattttcacgtgcagactatgaaaagataaaagataatcttgaggaagctattgttgtaaatggagaaatagattataagtatgagcagaacaatcttttaattggatttactcaaaaagaagtgaaagaagaaggaggaagtcaaagtttcaaaattaaaaaaatgggatatttggatgtaacgccgactaaaactactgatacttctattttaaatttgcttgaaggcaattataatatagatggtaataacgtttattctatatctgctagtgcaggagatccttttgtaattcatccgttattgtcagaaagtgaatggactggtgcagcgtatgttattaatagtagtgatgaggaggttaatgtagagacagagacttcaatggatggagaaggtatgtattttggaataactgtcccgaatgtatttaatgatgatttgattattgtttttaagggaacagacaacgttttcaagaaagctttagtaatttctccggatattaattaacttagtttattttgtaaatgaatctacaaaaattatactcaatatacctcttaccccttatcgtcagcatactgacgatagggttggtaacaggttgttccgacgatgatgaagcactgcaaagccagtatggttatgtgcagttccgacttttcaaaagcgcgtcgtttgaaggagcaactactcgtgcgacagacaaacttgaatcgttatcgagtgcacagaagataaaggtggtaatggagcataacggtacaaccgtttcgcagactttacctttgaacgcatacaatgaaaataatgcagaatatggtatgcgtagtgaaaaattgcagttagttgtcggtacttataaagttatcggttattatctgtatgacaaacaggatatagtgttgttggcaggtcctggtggagatgacaatgagttcgttgttgttggtggcggacttcaagagaaagcattggcagtagatgccgtgcctcgcggaacagtaactttcaaattgacaaaagaatggcttccagctactcgtgctgccggtgaatatctgtttagtgatattcgctttatcaatgtcacagtgatgaataccttcaatagggtcactactgaactgaaggatatgaaagtcacctataaagaagattctaaaaagaatgagatttctggtaatcctgataacaagtatatggatataggtgtagcgacctgcgactctgccgtatggcttcctgccggaacttatcaggtagtagcttacaccacttacacaaaaagcggtagtacaaaaaaggaactggaaacgcaacccgtcagaggcgaacctttcgttgtgaaagataatgagttgacagaagatgctaatgtgcctatccaattgaaggaaactgcagagtatatcaaggactatatagcactgaaagaaatttggaaagctttaggtggtgaaaattggaaatattatggaggttcagtagataattctgtgcacagctcaaattggaacttcaataaagaaatggacatgtggggcgaccagcccggtgttgatttggataacaacgggcgtgttaccggactttcagtcgccggctttggagccaaaggctttgttcctgatgctatcggacagttaacagaactgagaacattgtctttcggtacacatagcgagacgctgagcggaagaaagtttggtgaagacgaactgacaccagatatgagtgaggaacagaaacagcggatacgtatgcattataagagaacattccttgattacgacccgcgtctgaatatgtcggaacttatacaagatgctatcaataggaatccgaaaatgaaaccgatcaagaaaaacagtcgtattacattgaaggatacacaaataggaactttaactaacgatattaggtttgtatcgaaagctattatgcgattgactaaattgcaggcgctgttttttgccaattcgcctttcactcaagatgacatcgcaaccaagtgggcaaaagaggattccgaatatgccaaacaatatatgaatgaggacctgagctggagcaaaatggagtcattgacagatgtggaactgtataattgtcctaatatgacccgtcttccggaatttatatttgatcttccggatttacagttgcttaatattgcttgcaatagaggtattgaatctggcgatatattgactgattggcaaaaattggcggacgatgaagatacaggtccgaagattcagatcttatatatgggctacaacaatctggaagcattcccaccacacgattcattgaagaagatggtaaagcttggtttgctggattgtgtgcataataatattaaagatttgaatcctttcggtacggaagtcaaactgacaactcttaagctggattacaatcagatagaagaaattccggatgatttctgtgcgtttaccgatcaggtggaaggcttgggattttcacataacaagttgaagtatattccgaatatattcaatgccaaatcggtttatgtaatgggttctgtagatttctcatacaatgaaattggttcggaaggtaaaaatataaaatgtggaatgagtgagttcaagggtatcaatgccagtacgattaccttatcctataatcagatagagaaattcccgacagaattgtttgcgtcaggatctcctatttctactatcgatctgagcaataataagatgacgtcgattccggaatattcactgaaaccgaaagagggtaattataagaatacgtatctgctgactactatagacttgcgttttaataaactcacaagtttgtctgatgatttccgggcgaccactttaccttacttgagtaatatggatgtcggcttcaactgtttttctaaattcccgacgcagccgctgaacagtagtcagttgcaagcttttggtatccgccaccagcgtgatgcagaaggtaaccgtattttgcgtgaatggcctacaggtattactacttgtccgagtttgattcaattgcaaatcggttcgaatgacatccgtaaggttaccgaaacgctgacttcgaaactttggattttagatattgcagacaatcccaatatatctattgatgtgacaagcgtatgtccttatattgaagcaggtatgtatgcgcttatatatgataagacacaggatattcgtggttgtgatgctttggatattgaacgataataaaaaagatgctattaatgaaatatttaaataaaataacattaggactgattctttgtatgggattcgtttcatcgtgcaaggatgatgatgaagcgggaatcaatggtatctcggtagataaggaagagattactatcggtgccgaaggaggtactgagaggatatccgtctcgtctaatgatcaatgggtggcacgtgtatctgattctgatccttggattaccgtttcaccggcaaatggtctgggttcggcagattgtgttcttgccatagactctacactgagaaatactgtgcgcacggcaaagatacgcttttctatgaatggaggtgaatctaaattggttactgttacgcagtttggcttcggtaagcaaattatagtgagagaaccggaagtggaaattcccagttccgatactcacaaaaaacgtcattttgaaactaccatctctacgaatgttgaatttgtgatcgataaagtagattattcttttgccgaagaggctacaatgaccgctgaggagaaagcggaagtggagagagaacgtactggttggctgacatcgccgaaaaaggaggatttaaaggttgatcttgacaggggtgcgcgtccccgtactttgaaggttgatttccgttggggaatgaatgtggctccttatactcgtgtcgcaaaagtacgtttagttccggcacatccggaaacagaccaattagtagatgatgacggtaatgaaattgatgctgttgtgttgactgtaacacagaaggctgcaatgaaaattgaagataaccgttcgggagactcgttggctgtaatcactattaatagcaaactccagaccatgatgagtttcgatactagtgaaaatatgactaactgggattttgtgacgctttgggaggctactgataaggagattaaaaataacgaagttcctgaggaagcaataggacgtgtgcgttcggtaagttatgccatgattgatttgcaaagtggtgattccataccgaaggaaatccgttacttgaaatatctggaatcattctctattcaaagtaatgcgaaccgacagacacgtactgttcatttgggtgaggaaatctgtgaattggaatatttaaagaatctcactgtattttctcttggaattgaagacttccctaataattttgttaaattaggtaagaaactggagaaattggatttagcaagcaataatttcaagacattgtcagtgattactgaaaaagtaaaccagaacaatttcccgaaattgaaatatctgacattgaccggctgccgtgctacggaaacgctgagcgatttaagcctgattgaaggcactaaatacaatggtagagaggtcggattgtatgtgaatatttctaaagggcaactggaacgggaggctttcttgaaattgctgacttgggataatctgctttcactgcaaatgtcacacaattttatagagggtgaacttcctacagatgaagaagtaaccgaagctttgagagcggcgggaaaaccgctgacttataaggctgatgatttctttactaaagaggaactgacagctacgccgtctgtataccagagtaagatatcaaaagacacttgccaatggttgttgacaacagatcagcctgtggaatataagaaaaccaaaactacggtaaatgggcaacaaataccgcgtgtattgccatttgcccgtaatgttcatttcaacttgaacttcctgactggtgctgtgccgaattggattttattccatccttattttgcatattggtatccggaaaccatggtattcaatcaacaggagaatggtaagaattcaagtggaaccgtggttggatttagtaatgtggatttggttaactacgattattcttattattatggaaaagaagatccggggaacgatacagttgtggatggtgtagcttatccgttatatttcagaaaattcgtactatcggatacaactgactaggctaattgtggcataaatatcattaacaagaataatttaaaaaggaacaatgaagaaaaaattcttatatacagcactgtttgctatgatattggcttcatgctcggaacaagaacttattgaacaaccgtctacccctgtaggggggacggaagttcagcttccggctgatgttacttccggtgaactgctaattaaattcgatcctcaaatgaccgaaattcttgatcggactcttaaagtggcgacaagaagcggaggggcagcgactcgttccggtattccatctacggatgaagtattggatattttaggagcatatcattttgaacgtatattcccggtagatgttaagaatgaggagcgtacacgttctgccggattacatctctggtatcgggtaaagttcgatgaaaatacagatttgaaggaggctgccagtcgtcttgctaaattgggcgagatatccaaagtacaggctaatggtcatattaaacgtgcttataacactaaaggttacaggagttatataagcgaagctgcgttacaacaaaaatcagctatacgtgctgtaacagcaagcggtagattctctgatcccggattaccttatcagtggcattacatcaacagtggtactaatgagttcgataataaaaatgggcttaataatggttcggaagctggatgcgatgtaggttgtacggaagcttggaagaaatgtactggcgatcctgctattattgtggctgtgttggatgaaggagtgatgcatagtcatcccgatttaagagataatatgtggatgaacgaaggagaagaactttatgccgatacagataaagatggtaatggatataaagatgacaagtatggatacaatttcgtaagtgatacaggtattatctcgtggatggaggctgaagattccggacatggaacacacgttgcaggaactattgctgctgtgaatggtaatggtgaaggtgtttgcggtattgccggtggtgacggtcgagaaaattcgggagtgaaaataatgtcctgtcaggtcttttcaggtataaatggtgtcactttggacgcagaagccaaagctattaaatatgctgcggataatggtgctgttattttgcaatgtagttggggatataactcttctttggccaatatgattgaaggatattctcccggaccgggttcggaggaggaatgggaaaatatgtatccgctggaaaaagaagcattagattatttcatcaataacgccggttctcctaacggagtgattgacggtggattggcaatctttgctgctggtaacgaatatgcaggaatggccgcgtttcccgctgcttattccaaatgtatatcagtgagtgcagtggcggcagattttactcccgcttcttattcaaactatggtaaagaggtgactatttccgctcctggtggtgatacggaatattataataaggtgggacaggatgatcccgaaagttggtcggagggaatatattccggttctattttgtctacatggatacaaaatggtacagctacatacggatttatggatggtacatctatggcttgtccgcatgtatcgggagttgcagcactaggtttgtcatacgcttatcagcaacgtcgtcactttaaagctagtgaattcattgagctgctaaaggcttctgtaaaaccgttggatagttggtatggcaatggaaaggtgaaaaaatattatcgcaaccatctatcggtaggtgcttctcttacccaaataaatttgtcgaaatacattggtaagatgggggctggtcttgtagatgcaggacttttgcttgataatatcgaaggtaaaggttcggacatggtagtgccgaatgtgtatgtggcggaaggtgcggaatcgactctcaatttggcttactattatgtgggaggagagaacctgacttacatctgtacatcgagtgacacatcggttgctacggtaactgttgaaggtacactaatgaaagtatctggattgaaaaccggtgcgactcgcattctggtgaaagtaagtaacggaaacgaacagaccattacagttaccgtgcgtaagaatgcgaatgataacggttggatgtaaatgctgatattttaatgaaaccatttactctgatacggctaattttattaagtgcagtcattggacattgccggatgctcgaagccaggattggttgttcagctccacaggtacgaattgattcacttataaatccgccgttgttaaagcaggccggacaaatactgcatttcgacagtacattaataaatatcggaacattaaccgaagatgatgctccgaagacatatcgtttcatgtgtactaatgtaagtggtgagaccttgaatttaacccggatcaaaacgacttgtggatgcgtggttgcggatattcaatccggagatatattaccgggggaaacaaaggttatcggattgacttataatccgaataaccatcccggaacgatagatgcaaatgctttcgtttatttgtcgctttctgacgaaaaacctgtggcacgactcacattaagaggtaatgtgctgcccggcgcagatgaatgggcgcggtatccatatataatggggaaattgcggctcaaacaaaaccggatggaatttaaaatttccgggaaacgcttgtcagaacgaattctctgtggtaatagcggagagcaagagttacgtttgtcagcctccggtgttcccaagtttgcaacttttcgtacggaaccggaggttatcagtccggcgggagaagctgatatagtggttacgatagatacatcacagattccttcaggaaaaggcagttcgtttacctttcctattataatagaaggaatagatggaccgcagtctgaccgtacattgaatattagagtaaatcgtattgagtaacgtaataaataaaagaaaatatgaagaatatatttaatttgatagcattattcgccttcgtactttgtttcacttcttgtgatgacgatgagaagacggatattccgacattgccggtcactccggccaacttgaacggtacgtggcaactggccgaatggaacggacaatctcttgccgaaggtacgtattgctacataacctttaaccgtaaggaacaaacttttgaaatttaccagaagtttgacagcatgtacgcgcgttatatcactggcgattttagcattgaaaaagatccttatttgggatatgtgattagtggtgaatatgatttcggcaacggtgaatggaacaatgattatatcgtaaccgatttattggaagccggttctatgatttggacagcgaaagatgatgcgggagatgtatctaaatatgttcgctgtgacgaggttccttctaagattgtagaagaagcgagagctgatacggataattaagttttaatttacggaaagaaaaagaggattcacgccattcagtaaatggagtggatcctttttttatactgatttatctctttacctaataatgctagtcatgtcacaaaaaaaaagtcatgaattatttggaaataagattaaggatttctatctttgcattggatttataattgtaatgaatacaactttgaaaagaaaggaagatgatgaaaccatacgatcgattattagagcataatatcaagccttctatgcaacgcatcgctatcatggaatatttgatggagcatccgattcatccgtcggctgatgatatttacactgcattgtctccttcaatgccgacactttcaaagaccacggtttataatactttgaaattgttttccgaacagggggcggcattaatgcttacgattgacgaaaagaatacaaactttgatgcggatacttctgtacattctcatttcctttgcaaacgttgcggacatatttatgatttgaaatgtccggaagcgattaaacaagtggaaaatctggaaatggatggtcatcaggtatcggaagttcattattattataaaggtatttgcaagaattgcttaagtaaagataaagaaacacgtattgactaattaatttaaaattgagaagaaaatgaagaaatttagatgtactgtatgcggttacgttcatgaaggtgacgcagctcctgagaaatgtccattgtgtaaggctcctgccagcaaattcgtagaagttgttgaagtagaaggtggcgcattgtcttttgctgacgaacacgttatcggtgtggcaaaaggttgtgacgaagaaatgattaaggacctgaacaatcacttcatgggagaatgtactgaagttggtatgtatttggccatgagccgtcaggcagaccgcgaaggttatcctgaagtagctgaagctttcaaacgttacgcttgggaagaagctgaacatgctgctaagtttgcagaactgttgggtgattgtgtatgggatactaaaacgaacctgcagaaacgtaaagatgctgaacaaggtgcatgcgaagacaaaaaacgtatcgcaactcgtgctaaagctctgaatctggatgctatccatgacactgtacacgaaatgtgcaaagacgaagctcgtcacggtaaaggttttgaaggattgtacaaccgttatttcggtgataagaaataattaagcctaataaactcttaaaaggtctgtattctgcaacgaatacagaccttttttatttatatttgtctatcaatttttaaataccacagttatgagaaaagtacaactattgttagtttgtttaatgctttcggtggctgcttttgctgctgataaagtgattaaattgccgaagcctaatttaaaccgtaccgatgcggtgatgaaggcattgtctgaacgacattcaactcgcgagtatgcttctaaatcattgagtctgtcggatctgtctgatttgttatgggctgctaatgggataaaccgtaaggaatccggaatgagaacagctccgtcggcgttgaataagcaggatgtggatgtatatgtagtattacctgaaggaagttatctgtatgatgctaaaaatcatcagttgactctggttgctgaaggagatcatcgtggagcagtagccggtggacaggcatttgtgaaaacagctccggtgtccttggtgttaatcagtgatctttccagatttggagatgcgaagagtgcacgcagccagttgatgggggctatggattccggcatcgtttctcaaaatatttcaatattctgttccgctgctaacatagcaacagtgccacgcgcttcgatggacaatgaacaattgaagaaagttttgaaattgaaagatagccaaatgccaatgatgaatcatcctgtgggatacttcaaataaggattggcaagatatacaaaagagtgacggtatcccgcaaggataccgtcactcttttcctattatagcgttactatcccgaccggatagcgtcactatattttcttctttacttcaagagaaattcatcaatcgcttttttgtaagttgccttgtcagcagctccacggaaaagctgtggatctcctttcatgggaatgaatacaaacaatggaatacttgttgcattaaataaagctgccagttctttttgtttatctacattgactttgtagatgacaatttttccggcatattcctttgccaattctttcatgataggagctgtttggcgacatggtccgcaccaatctgcatataagtcgatgatggcgggcttattacctttataattccactcctttgatttctcataatcgaagacgtctttcagaaacatatctttgtccattacgacgacttcaccgttacctgttacctcttttttaccttgattagtttccctactgtcattgaatgcgtatacaattacacttgccatgacgagggctaccattactaatactttcttcattcgttattattatctttttatgtataatgcttctcgataaccccttgtagttcgctactatggattacgccggaatgtctccagacagcctctccattcttgaacagtataaaggttggtacagcttgtatgcgatatttagtagccaggtcttcatgctggtcaacgtctatctttgcaatacgtgctttatctcccacaataagttttagttcttctaaaaccggtttcattgctttgcaaggtccacaccattctgcaaagaaatcaactaaaacgggcactggtgactgtattaaatcttcaaatttttccataatcttttctttcttagagttaaaaagcagtctttgaagaccgcaaatataatttctattttattatataacgagaaaaagctgattttgttcatgaaatagtaatcatagagtcatcatcttgtaatgtgaaagagggaattttgcgtatctaaaaataatggaactatgaaatttttatttattgttcaaggtgaggggagagggcattttacacaggcaatcactctcgaagaaatgttattgcgcaatgggcatgaagtagtggaagtcttagtcgggaaaagctcgacacgtactttgccgggatttttcaatcggagtattcatgcaccggtgaagcgattcattagtccgaactttctgcctacggcagataataaacgggcgaacctgacgaaaagctttgcatacaatttattaagattaccggagtatcttcgtagcatgtattatataaatcagcggatcagggagacaggggcggaagttgtcatcaacttctacgagcttttaaccggacttacctatgcactcttccgtccctccgttccgtatatttgtgttgggcatcagtatctgtttttacatcgtgatttcgagtttccggataaaaattcgtgccagttatggatgctgcgtttctttacccggatgaccgctctaagatcttcgaagaaactggctttgtctttcctggaaatggaacaggatgatatgaatcaaatagtgaccgttcctccattaattcgtcaggaagtgaccgctatccgtccggaaaagggtgattatattcatggatatatggttaattccgggtttgctgatagcgtggagagttttcatgcgaaacatccggaagttcctttaacttttttctgggatagatcggatgctgaagaggtgacacggattgacgaaacattgagtttccatcaaatagatgatgtgaagtttcttaatgctatggcgggttgtaaggcttatgccagtacggcaggcttcgagtctatttgcgaagcaatgtatcttggaaaacctgtattaatggttccagcacatattgaacaagactgcaatgcctatgatgcaatgaaagcgggggcaggaataatcagtgattcctttgatttgcagccgttgcttcgttttgcaggagaatatactccgaaccgtcatttcgtttattgggttcgtagctgtgaacgtcggatgatccgtgaactggagaaactggcagcttcacattcagaaataacttcaataccaacattcactaattatttaccaatatgaaactaaacagaccggattatgtgcttgaacgcgcatcagatggtggctactatgtctggttgactgtaaatatgcaatgtaatgcttatggggaatctcctgaagaagcagttcagaatttacagaatataatgaatgagatgattgacgagatgtatatggtggaagagtttatataaattgaaaatagagaattaaaaattgagaaatataatgccagatggcataacttttatttctcaatttttaattctcaactctcaacttactcaatgctaagttcgtcgatgatatgagaggctcctgcgtatttatcgatgataaacaaggtatagcggatgtcaacacaagcggctcgctgcgatgaaggacggaaagcaatgtctcctgttaagccttcaaagttgcggtcgaaagctgttccaaccagctgacctttgctgttaaataccggactgccggagtttcctcctgtattatcggtgtttacgataaagcagacaggcatttcaccgtttttgccataacgtccataatcctgggagttatatagctcttttagtttttgaggcactacgaattcccagtttccctgatcttctttttccatcacacctttgagggtggtatgagcatcatataccacaccgtcagccggttcataagaaaacacctggccgtatgtcaatcgtaaagtagagttcgcatccggataaatcggcgttcctttttcctgtctcatgtccatcatgcctttcacccatactttatgagctgcgtcatagttctgattggcttctttcatggcaatggctgttttcagaattccgtcggtaacagaatatttgaataataccatccagtcatatcctattttatacaaacttggtttcttgataaacttctcaaagtttttaggattgccgaaaatggaatgttcgaaacaggcatcaacgaaggcgtcaatacttcccttgaaacgagaattgatgatttcgaagatgttgattcgttgttctgcaggaatgtagttggcataagtcttcagcatttctttcgctaccatccgttccacgtcggggaaagggacagaagcaaaatacttatcaccttctttcttcagttttagttttgcttcttttatctgctctttatctttcgatttcagagcggtaaccaattctgtcgtggaagggatacgcataaaatcaagggcggtgaccaatgcttcattgatagcctgctgatgatatagcgcattgcgtcggtgagatacaatagagcgaatctcatcaaaggctttctgatacgaatcatctcccttttcacggccgcgggctaatagttcttcttgctgtgcacgtttggtatccagtacattgaggcgtatcagtccttcattcatgccgattgcatttttccaataattggccgaagaagcatatttgcttgcataatgaatacgcactgccggatctttcagcatttgctccataagtactttctgacgggctccgcgtacatgctggcgcatgaaattggtcgtttgcatccgttcttccacttcgtcggcaatcatataccgccagttacgtccggggaatcccatgacaaaggtgaaatctccttcctgaactccggcgaggctgatcttcagatgttttttcacttgcagaggaacgttgtctttagaatattctgccggttttccattcttgtccgcgtaaatacggaagagagaaaagtcgcctgtgtgacgaggccacatccagttgtcggtatcagctccgaatttaccgatggaagaaggaggagcccctaccatacgaatatcactgtatactgttttgatgaacagataatatttgtttcctccataaaaagccttgagctccaactttgttgcaggagttatttctatattctcggctttggcaaaacgttctgctacgttgccaagataacttggagatagataattaacaccatccgggtccggatcttttttcagttgttcgttgacgtaatccgtcacatcgagaatccggtcgataaaagtgacggtcaatcccggagtagggagttccgcatcacggttcatagcccagaaaccatctgtcagatagtcatgttctacattactatgttgctggatagctccataaccacagtgatggttagtcagtaccagtccttcggaagagataacttctcccgtacatcctcctccgaagtgtacaacagcgtcttttagagaaaggccatttgcgttgtatacttcctctatcggaatttcgagaccaagttcgcgcatggcaacagcgttctgtgctttcagatcggttagcatccacatgccttcgtcggcgtggatgctaagagttgccagtgaaaataggacaaataggatttgttttctcatttattctacgattgtcatttcattgattaggtgtccgcagtttcctaacttttccagaatgaacaggacataacggatatccaggttaatacaacgttgtaggttgttgtcgaagtggatgtcaccgcttaatgattcccagttgccatcaaaagcgcaaccgatcagttctccgttttcattcagtaccgggctgccggagttaccaccggtgatgtcgttggtcgacaggaagcagacaggcatatcaccatttggcaaagcatagcggccataatctttcttttcgatcagttctttcagtttggcaggtacaacgaattcacggtcttccggattttctttttcaagaatacctttagtggtcgtatagtagttgtagtgtacgccgtctttcggatcataaggtttcacgttaccataggtcagacgaatggtaaagtttgcatccggataagaaggtacaggcaacttcatttcacctagaccacggatataagttttgtgcagcaaagctagttcctgatccatatccttgagctgggaagccagtgtatccatcaagtcgtatttagactggcagtattgtagtgccagatcattgtcaatcgctttcactgaaggcttctttgtaaacttctcgaagtttgcccggttggcaaaaatagagttgtcatacatatcatcaacgaatttgttataatcgcctttatatttctgctcaataaccttataaatagaaggacgttggtttgccggaatcatttcagcatataaggggaacaaggctttcgctaccttgcggtctacttcatgatcgtaatctttgttatggatgctttcgtaagtgctttccaaggctttcatgcgtgcttcgattacagaatcgtttttctcaagtaatgcttcgcgtgttttagtcaacatcacattgccaaattcgatagctccgaagaaagtctctctcaaacaggtgtactgatagttgagaggagttgtcttagctaccaggtcatcaatgttcttcactaccgctgcatattcagcattgttttgtgcttttgcaaactctgcgaatttggcttcttgtgcagcttttgttcccaatacatcattatcgatgatggccttattcatgccgatggagtttttccaatagttgctggaacccgcatacttgttagcatattgaatacggattttgtcactggcattcattacctctttcaggacagccaaacgtgcaccacgaatacggatacgtggatcgttttccgattccatacgttcttttacttctgatacagtcaggtagcggctcgtacttccggggaatcccataatcattgcataatctccttctttcaatcctttgatagagatagacaaatgtttcttggttttcagtgggacgttgctctcgctgtattctgcaggttcaccatttgcatctgcataaatacggaacatggaaaagtcaccggtatgacgcggccacatccagttgtctgtttcaccaccaaacttaccgatagaagagggtggagcggctaccatacgtacatccggatatattttcttgtagaaaagatagaatttatttccggcatagaacggaagagcttgcggaacaattccctttttgtctgccaggtcacttttaaaataaagatcatgagccagcttttgaaggaatatattgctgaatgattcggattcggtgatttctttcgccgcgatcttggcattgacaatatccgtaatatcttcgatacgttcgataaatgtgaattgcaatcccggagtagggagttctttgtctctggaagtagcccagaaaccatcagtcagataatcgtgctcaacactactatgttgctggatggaggcgtagccacaatggtgattggtcagaatcaaaccttcgggtgagataatttctccggtacatccgcctccgaatatacctacggcatctttaagagaaattccattcggattatataggtcctgtgcttccagttttaatccttgttttttcatcatgtctaaggagtgttgctgttgcatcagttgcaatagccacataccctcatccgctttaacggaacatacaaaaagcgcagccagcgctaatagataaagtcttagtctgttcattatttaatgataaaattaaaatatatgattggttagtattcaattttcaaatctccgttcttcagtgcttccatgatattagcaggcggacgttgattcatcagttcgtttttcataaagtccatataaggagctacatgcttaaagaactggtaatagcctttgcataagtaattcaatcccggttcgccttctgccgtttggctgaaacgatttttcgggcattctccgttgcaggcaaacaggaactcacattccttgcattgagtagggagagactgatatttcatgttcccgaaattgtgctgacgctcgctatgcatcatttccaccagagttttactataaatgttacctaatttatattcgggaaatacaaaatggtcgcacgaataaacatctccgttgaattccatcacaccggcatgaccgcaggtctttgccattgtgcatataccaggctgttcgcccatccagttcgccagagtcgaatcgaatatttgtacatagtacttgcctacatcttctttcacccattcgtcgaaaagagcacaaaggaagttgccccattgctccggagtgatcgaaaaatcggcaagggttccggctttattttctgcaagagaagcgaggtgacgaccgtcctcatgtgagagaatacgttcaacgataggagcgaactggatatactgacaaccgatttctttgaagaaacgataaaagtctagtggatagtcggcattgaagtcattaataaccgccatcgcattccattccaccccatgttttttcaaaagattgatgccttgcatcactttcacaaaagagggttttcccattttatttttgcgatactcgtcatgaaactcctggggaccatcgatagagactcctaccagccaattattttcacggaagaactcgcaccattcgtcggtgagcatggttccgttggtttggatgcagttgtcgatcgttcgtccgcgggcatactttttttgtagttccatcgcctttttatagaaggagagcggtcgcatcagcgtttctcctccgtgccaggtgaaaagcacctgcggcatggtttgtgagttaatgtactcgtcgataaacttttccagaagttcatcgctcattacgtgtttcagattgtctttgtataggttggccttttccaaatagtagcaataatcgcatgctagattacatacggcacctacaggctttaccattacataaagcggtttggcaaaaggggcaaatgttgatgttttcatgaccgcaaaattagataaactaaatgaaaaaaatagccttatacctatgtttataaggattattaaagaaaagagtcttacaagatttaaatattgataaaatgtttctttgaattctgaatcagttgtacctttgtacccagaatttaatgaatagatgaacgtgaataaaattttgccttttttgcttttgcttccgtttttggcttcctgcaccagtaagtacaagattgaaggaacctcttcagtgaatagtctggatggaaagatgttgtatcttaagtcccttcgtgatggagagtgggtgaagctggattcagctgaagtagtgcatggtctgttctcaatgaaagggaaaatagattccgtacagatggtgacactttatatggatgaagaaagcattatgccgattgtgctggaaagtgggaagataacagttaccattagcaacacggacctcaaggcagtcggaacatctttaaataatgcactgtacgagtttatcagcaaaagaaaccaattggaagaaagcattggtgaactggagcagaaggaaacccgtatggtactggatggaggcgatctggatgaaattcacggtcagttggtggtggaaggagactcactgatgaaagcgatgaatcagtatgtaaaaacgttcatctccgataattacgaaaatgtgctgggacccagtgtgtttatgatgctctgcagctctttgccctatcccattatgactccgcagattgatgatataatcaaggatgctccttattcttttaaagataataagctggttagagagttcctgtctaaagcaagagaaaacatgaagttgatagaagaacatcaacgattggaacaaaatgcttcaacaaataagtaatacttgagttttttgtgtatttttgcacaaaactcaagtaaagtgaaaacgactactgtttcggtatacgccgctttcttttttattttagtcttatcggtttcttgtcatagagattcggaggcccctgatgcggcattccagaggatcgaaatgtgcatggaatctcttccggatacagctctgtatctattaaagtcaatacctcatactgaaaaattgcgtggaaagttgcaggcggattatgcacttttattgacgcaggcgatggatcagaactatgtgaagtttacttctgactcattgattgcactggcgctgaattactatactgtagagcgtggtgactctgttacgcgtgctaaagcgcagtattattatggaagagtgctgcgtgaattgggcaaagatgaagaggctttgacgtttttatcttcggcaaaagaaatgttcgggaatattcaatgttgtaagatgtttgcaatggctactgatgagatagggatgattaaccggaaaaagaaattgtatcaggagtcgttgaagaattttcgggagtcatatacgatctatgaagagttgaaagattctttgagtcttgtcagagccgggcaaaatataggccgggcttatttgtttcagaataaatgggatagctgttatttctattatacttacgctttagaactagccagggaaaagcaatatccgtctgaagtttccattttacatgagttggggatactgtaccgttccatgggagaactgaaaaagtcagaacgctattttcttgctgcttatgaaaaagaaacggatgaagaaaggaaatacgtggagtgtatgtctctcggctatttgtatatacagatgggcgatgtagagaatgcccggaaatattttaagatgagtatcaattcttctaaagaatatacccgtattgacgcatataacaatttatactttcttgaaaaagatattgataattttgaagaagcgattatctaccatgaaaaagcggactctatcgtgaatgtattggatgaagtcgattcgcaggagttgataacagaactgcaaaagcagtacgagaacgagaaactccggaatgataatctacaactgaaagtggaccgtacagtttttatattttgcggtacggttattttcctgattgtggccttctatatgtgttattactactacaaaagtaaaaatcacaggaagaagattgccgaaatcgaatctcagattagagataatgaagaggagataaagcgataccagcaggagatggaagaaatccaggagttgaaagatcaagtactggaagagaaccgcatactggaagaaaatcgaatgaaggtaggcgagttgaatggaaagattgtacttctaagtatgcagaacaaaaccttatcgggactattgaaagaactgggaggagaattaactgtcggaccctcttctgaacagtacatatccgcttttcgtctgctgcttgctatcaaagagggaacattaagaggtaaattgtctaatggagaacgctataaattgtttagcctgtttgatttactctattctaattacgttacccggttgcttgacaaaactcctttattaactaaacatgatcttgagatctgttgctttcttaaatttggactgaccaatgaagaactggcgcgtatttttcagacctcttccgattctgttaccaaagcaaaaggaaggctgaaaggtcgattaggcatttctccacaagaagatttgaatgtgtttttaagggatttttgataaataaaaaatgaattgtccgggtcattaatagaacgctaatctgtatttgattgaaatgtaagtgtttacgaaaaatcaggcgcactgattttgtccgggtgactttttttgtgttttcggatgcatgctgtacttttgacacaacaaaaaccaaatagctatatgaaaaatcctaatgaattatctgccgcctcttctttgagaggtgacgaattgcagttaatagaacaaaaagccagcattgttgtcggaatagcaaattctcgcaccaggttacggataggaattctattaagtaaatattcagagtatcaggtggattatatatcctccgagagtgagatcggtaaactgattgaagaagccgacttgattattggtgcggggattaccgcttacgaaggggtattgcgccgaaagccggtgattgtagtgggtgattatggcttgggaggtctggttactccggatacattccgcaagcattataacaatcggtttagagggaagattaatggtgtcagaaatgaatctttctcattagagaatttagaaaaggaaatttataaaagttttaatttgacttttcaagaattacaaatgatgtcaaaccaaaccataaccttgcaaaacatctaaatatctgaatttcttaatttaatagtttgatgcataaaactggttaggaatatgggggtgcgtgagcatccccatatttatataagattatgtactgactatcggtcttgatcttcgtttttcaccattcccttgtattgttccggtagggcgctttcaaccgcagcgtaggcctctgccatggttgccttgatattttccattcctttccctttgggaggaataggctcgtgaatagtcagaatcatgcgatgacggtgtatccatttgcctgtgcgtggcagaatctcgaatgagccgtcaatggtgacgggtacaaccgccaactgtaaatcatcagccaactggaaagcgcctttcttaaagtatcccatgtgtcctgtaaatgtacgcgctccttcaggaaagactacgagagaaaccccgtctttcaatgagtcttttgcctgccggattgtttccaatacttttttagggccggatctgtctacaaagatatgtcctgcactttcacaggcttttcctacaaacggcagtttgcgcaggctttttttcatcatccacttaaagtttcttccgatgaagccgtaaataaggaaaatatcaaatgaaccctgatggttaggtacgaaaatataggaagtcttgtcatgcaacttttcacgtccctcaatcttcacgggaatcaatagaaacagacaaattaattgtgaccaaatcttccccggataatatccccagatgtgggctcctcccaagagagaacctacaatagtgacgattgccgtgaggatggtcaacactaataaaataggcaaagcgatgcaaatctgataaatataatacagtatcttcatagggttggatttttatcctgcaaatatacatgattattggtaaaaaagagaggcagatgtgatataatctttttgattgtgttatttttgcctcttgttattagagatagttacaaaattgtgatacgtatattacatactgccgactggcatctgggacaaaccttttttggttatgatcgcacggaagaacatggagtatttctgaattggctggcagaagaaattcgtcagaaagagattgatgcattgattatagccggagatgtttttgatgtttccaacccttccgcagcatcccaaagcatgtattatcagtttatttatcgggtgacagcagagaatccgtatttgcagattgtcattgttgccggcaaccatgattcggcagcacgcctggaggctcctttgcctctgttgcaagctatgcggacggaagtcagaggggtagttcgcaagctcgaaggcggagaaatcgattatgaccatttgactgtggaactgaagaaccggaaaggggaagtggaattgctttgcatggcagttccttttctgcgtcagggagattatccggccgtgcaaacggaaggcaatccgtatgcggagggagttcgcgaactttatgcacaacttttgcaaaggctatggaagcgaaggacggagaatcaggcgattcttgccatcggtcatttgcaggctacaggatcggaaattgcagagaaggattatagcgagcgtaccgtgattggtgggctggagtgcgtatctccggaaactttttccgaacagatagcttatacggcattgggacatatacataaagcgcagcgagtgtccggaagagagaatgtgcggtatgccggaagtcccattccgatgtcttttgccgagaaacattatcatcatggagtcgtgatggtgactttcgacggaggctgtgcggtggacattgaacggttggaatgcccgaaattaatacctttgttgagtgtcccgaacggagaacctgtttcaccggaagccatcttggaagccttgaaggaactacccgagacagaagccgtagccccatatctggaagtaaaggtattgttggaggaaccggaacccatgcttcggcaggagattgaagatgcactggcagataaaaactatcggttggcgcgtattgtttctacctatcgcactgaaactggaaatacgacgaaagaaaatgaaaactggaagagggggttgcaggaaatgtctcccttgcagattgcacagtctgcctttgagaagatttatcaggtggaaatgcctgtagaactgacaggtttgtttgaagaggcctatttggctgctacccgtaaagaagaggaggaagaagaatgaaaatactagctatacgattgaagaatctgacctcgatagaaggaacggtagaagtggattttatggcagaaccattacattctgcaggtatctttgccatttcaggacctaccggtgcaggtaagtctactttattagatgccttatgcctggcattgtatgataaggctccccgctttgctacttcagtggaaaatgtgaacctggcagatgtgggagacaatcagattaatcagtctgatgttagaaatttgctgcgccgggggacaagtgacggttatgcggaagtcgattttttaggtattgacggacggcgttaccgttctcgttggtcggtgaggcggacaagaaacaagataaacggttctttgcagccacaaacgctggaagtgaaagaactggatacggagaaagaatttcaaggtaccaagaaagagttgttgattcagttggtggagttggttggcctgacgtatgaacagttcacccgtacagtattattggcacaaaatgattttgctacatttctgaaatcaaaaggggcggcaaaagcagaattactggagaagttgacaggaaccggcgtgtattcccggatttctcaagaggtctatgcccggaataaggcggcacaagaagaggtgaccttgattcagaatcgaatgaatgtgatcgaattgatgccggaagaagagctgcttgctctgcaaaaagagaaagaactatcgactgaaaagcgtgcggcagggattaaactgctggcagaacagaatgaacaactgaatgtggttcgttcattaaaaatacaggaagaactttgtaagaaaaagcagcaggaagaacaggaggaacaggctagggagaaagttctgcagggtgcattggcttcccaagaggaaggattggtgcattttaaggcacaatgggaggccatacagccggacttgaagaaagcacgtcaattggatgtacagatacagtctcaacaaagcagctatatacagtcgcagcagattttacaagcggctaacaggcaggtggcggagcaggaacaaaaaatgcgagtggctgcggaacaattacaggtgtcttattcttctctgaaccgcttattaagccatgtagggatagaagaagcactgcaacttgaacaggtggaagagattctacggcaagaagaaaacaaactggctgccgctacaagtacgaatgaggaacgtttattgcgcttaaattctttcggatatccgttattggccgaagaacaggtgaagttgcaaaaagagttgactcgtcagcagaatatccggcaattaacggaaacgcagacgaaagcaaagacggaaatagaaagactggagaaagaagtggccaattgtctgaaacaattgacggagcaagaaactgcattgaaagttactcaacgtctttacgaaaatgcacgtatggcagtgggaaaagatgtgaaagcattgcgccggcaattacaggaaggggaggcttgtccggtttgcggtagcacagcgcatccttatcatcaggaacaggaggtggtagatactcttttccggagtatagaacaggagtataatgtagcatcaaccaactatcagcagatgaataaccggagcattgctctgcaacgtgatttggcgcatcaaaaaacggtggacggacagatcgcggaacagttggcagcattatataaagcagggattgaagccggaaacgaagagcaaatacaacaccgtttggcggaactggcaatacgtattttggaatatcgcaatctttatgcagaatggcagcgcagcgatgaagaaattaaaaagatgcgtgcacattgtgaagccctccgtgagaatgtttctctctgtcgtttggctatgcagaaagtatcgtctgccaaagaacagctggtaatcttacagaatgctgcttcggccgaactaaagagatttgaagtgatagagaaagcgctgaatgtgcttcgtcaggaacgttcgcagctattgaaaggaaaaagtgcggatgaagcggaagctgccgtagcaaaaagagagaaagaactgaatctcgctttggagaaagcacgtaaagaagtagaggcggtacacaaccggctttccggtttgcaaggagagatgaagcaaattgcactggctataggagagttgcaggaacagtataaaaagatagagtctcccgaactgcttcccgaaataataaagaagcaacaggaagaaaacctgaatatagaacgtgccctttctactatggaagcccgcctgctacaacaagcaaagaataaactgactgtggaacagattgcgaaggaactggcagagaaacaaactgttgccgaacgttgggcaaaattgaataaactgattggcagtgcggatggagcgaaatttaaagtgattgctcaaagttatactttgaatttgttgttgcttcatgccaataaacatttatcctatctctctaaacgctataagctgcaacaggtacccgatacgttggcacttcaggtaatagattgcgatatgtgtgatgaaatacggaccgtgtactctctttcaggaggtgaatcgttcctgatttctttggcactggctttaggtttgtcttccttgtcaagtaataatctgaaagttgaatctctttttattgatgaaggtttcggctctttggatgcggaaagtttgcgtacagcgatggaagcattggaacaattacagatgcaggggcggaaaataggagtaatctctcatgtgcaggagatgagtgaacggatttctgttcaggtgcaggtacataagaaagtgaatggaaaaagtgtgcttaccgtggtggggtaagcacactccttactacttagtatgaattattcaggttggattcttttacattaattcgttcagttcgcttaaattctttttgatttcgtggatacgatttaagaacttcttgcggtaaatccataagatcaatcccagtcctccgccccataacaggatgaagaaagcgatcatccccattccatattgccacacttgccagtagataaatgaaagtatagccaggaccaggagaaaggcaatagcaatcaatcgttccctgatggtccatcgatggatacggttcacgcggctgattacttctaccaaaggcatctcgtctatttgtgtccgttggaggaaacgggtggtgacgatatcccagcaaagggcaggaatccatgcgaaaatgataatgatatagatcgggtttaatctgttgtgcaacagtacctccgctaaaaataagatcagtatcggcagagaaatcagaataagcttgatgttcagtctggcaatggcatggatacctttgtccgcatgccttatcagcttttcaagctcttcttctttgatgaactctttgtctttcaagtgttcatccagggcattccaagattttttaagttcttccagttccatatatcttattcctcctttttcattcttttaagtttgtctttgatgcgacttagtttggtcgctacattggtaaccgtcagtccggtgatttctgctatttcctcgtaacttttgtcttcgagataaagcaggataattgatttgtcgagttgtcccagttggttaatcatctgataaagctgtttcaacatttcgttgatcgggtcgtgtgcttctatggcccagtcggtatctctggtgaggctgactatttccggcacattcttttctttacgatagaagctgatacaggtgttgagggcaatacggtaaatccaggtggaaaccttacattcttttctgaatttgggataggctttccaaaggttcaataccacatcctgatacagatcattgagaggagcattgggattggcatacagatagcataccttgtagatcacccgttcatattcgcggatcaccgacaaaaactcttgttcaataggggcgctaacctctgctgtttgttctctcatggaatctatgattacttttctggttagttagtcgtgagaaaaggagaaaaatcacaggggaataaggactattggagattagctgccagaaacttacacatttcttcgatactttttccccgacggcgggcataatcttccaattggtcttctccaatctttccgacggagaagtattcggaagccggatgtgaaaacataagtccgcaaacagaagcgtgcgggtacatagctccgttttcggtcagcgaaatgcctatctgcttcatgtccaacagttcatccaacaggaagttgacggattgatccggtaaagacgggtaaccgacagcagggcgaatgccttgatacttttcgaccagtaagtccgctatgcctaaattctcgtctttggcatatccccacgcttctttgcgcacatattcatgcatcttttctgttgctgcttctgccagtcggtcggagagggtttggacaagcaggtgtttataagggtcctgttcgtacaatccttccatgtccgcatcaatggaagaggcaaaagcaccgatggtatccgggatgccggaagagatcgggcggataaagtcacttagacaaagaaaaggactaccgtctcttttcggcgtttgctggcgcagtaaaggaaaagtgatgaaccggtctttttctttctcaataatcaggttatccccgtcagagtttgccttgcaaagcttgaagatggtctttacttcataatcccggtcaagcagatcgagcatccggttggcctctttgaatagctgcattgcttcggaagctttattacgttcttcttccgggaaagttgtcagccacgaagcacggcaggcatcacatccgtgaatgttggcgatggctgcaaaacgtggctggaacccccatgcgtggaaaaagtaaatccagttgatgtagggagtgactgtatgtattttataagataaaatggtactcataggcttgttgaaggcgagctgctgtttatctgaatcttaattcctgtccgcgataagtctcgtctatttctccgttgttatataacagatgtccgtttacaaatgttttctctactttccagtcgaatgtgtgtccctctaatgggctccatttacatttgcttagaacacaatcggttgttacagtccattcgcttccgggacggactaataccaggtcagcctgatagcctttgcgaatgaatcctctgttttgtatctcatacatctgcgcaggagcatgagccatcttttctactactttttcgatagtaaacactcctttttctgtcaactccaacatgctgacgagtgagaactgaatcatcggcattccggacattgcttttaaggcaccgccttctttttcgctaagtaaatgtggggcatgatctgtggcaatagcatcaatcaaaccgctattgacagcctctcgcaaagctttccggtcttgcgctgtcttaatggcagggttgcatttgatgcgggtacccagtgtctgatagtcctcttccgtaaagagcagatgagaaacacaggcttctgccgtgatctttttttgtaccaaaggtacgttagaaaacaggctcaactctttagctgtggaaatatgcatgatgtgcaggcgggcgtttgtctcacgtgccaactgcactgccagttcggatgaacgatagcaagcttcttccgaacgaaggagcggatgaagagccaaaggtacgtcgtctccgtattctttcttatatttatccgtgttttctttgataattccctgatcttcgcaatgagcagcgatgagcagatcggttccaccgaatatattacgcagactggccatccggtctaccagcatattgccggtgcttgaacccataaataacttcactccacaaacccggtgtttatccagttgtgcaaactgggtatagttattattcgttgctccgaaatagcaggaatagttgactgctgacttttcacccaacagaacaaatttttcctccaaagcctccaatgtggtagtttgcggattggtattgggcatatccatgatagaggtgacacctcctgctgccgcagcacgactttctgtggtgatatctgccttatgagtcagtccgggatcgcggaaatgcacatgttcgtcgatggcacccggcaaaagataacacccggttgcgtctattatctcgtcgcagggggcagttgcgttttcttcaccaaccaatatttcggctatcttttcattctcgattactactgaacccagaacttttcttccttcgttgacaataacggcgttttgaatcagtgtacgtttcatttcttttgtgggaatttatggaaccaactatttacttttaattttatcacaccaaatatggcttctccaaagatgctgctattcattttagaagtccctaattcacgattaataaagataacgggaacctcgataattttgaaaccacacttgtaagcagtgaatttcatttcaatctgaaaggcatatcctttaaagcgaatatgatctaaatcgatcgtttccaatacctgacggcggtagcaaacaaatccggcagtggtgtcatgtacaggtattccggtgataaaccgcacatatttagaggcgaagtatgacatcaatacccgtcccatcggccaattcactacattcactccgctgacataacgggaaccgatggatacatctcctccttgttccgaacaagcctgatacaaacggggtaaatcattcggattatgactgaagtctgcatccatttcaaaaatatactcgtatgcgtgttccagtgcccatttaaatccggtaatgtaggcagtacccagtcccagttttcctttacgttctatcataaaaagctgttcgggaaattcttgttgcagttttcttacgatggctgccgttccgtccggagagccgtcttctatgaccagaatatggaatacttggggaaggccgaaaacggcacggatgatattttctatgttctcccgttcattataggtggggataattacaatgctatccgatgtctgcatatagatactataaaatttagaaacaaaagtagttctttttcctttagttatagctgaactaaggaaaatttaacgtgtttcatgccccatgcggaataagacggcagataccttattataatacttctgttctttgggtgcatactcccaatcttttttgtaattttgcggggaaattttataggtatgacaataactgagttgcaacaacaatatgctgcccatcccaatatggcagtaatgaagcgcttgttgaaggacacttccgttcagactgttttttgcggaggactgtgtgcatccgccgcttctcttttttcttctgtactggtgcaagagggtggttgcccgtttgtatttattttaggcgatcttgaagaagccggatatttctatcacgacttgacgcagatattgggtacggaaagagtgttgttctttccatcttcattccgtcgctccatcaagtatggacaaaaagatgcggccaatgagattttgcgtacagaagtacttagccgcttgcaaaagggggaagagggattatgtatcgttacgtacccggatgcattggcggagaaagtggtgtcgcgcaaggaattgagtaataaaacgctgaagctgaatgtaggagagaaagtggataccactttcatcaccgatgtgttgcatagttatggttttgaatatgtagactacgtatatgagccgggacaatatgctgttcgcggtagtattatcgacgttttctcttttgcttcggaatatccttatcgcatcgatttctttggtgatgaagtggaaagtgtccgtacctttgaagtggaatctcaactatcccgtgagaagaaagatggagtgtctatcgttcccgatttggcggtgacaggagatgtaacgacttcttttctggattttatcccgaaagagactactttggcaatgcgtgattttctttggttgcgcgagcgaatccaggtggtacacgatgaggcgctgactccacaggcaatagccgttcaggaggccgaagagaatggtggcattacattggaagggaaattgatagacggcagcgagtttactgtgcgggcacttgatttccgccggttggaatttggtaataaaccgaccggaacgcccaatgccagcgttactttcaatacatctgcccagcctatttttcataagaatttcgatctggtagcttcttctttcaaggattatctggaaaagggctattcgctttatatctgcagtgacagcatgaagcaaacagatcgtatcaaagcgatttttgaggatcggggtgataagattaattttactcccgtagaacgtactattcatgaaggttttgtagataacacactgcggctctgtatcttcacagaccatcagttgtttgatcgttttcataaatataatctgaaaagtgataaagcccgttcgggaaaagtggcactatccttgaaagaactgaatcagttcactccgggagactatgtggtgcatacggatcatggtatcggacgtttttccggtttggtacgtattccgaacggtgatactacgcaagaggttttgaaactggtgtttcaaaatgaagatgtggtgttcgtttctattcattccttgcataaggtttccaaatataaaggtaaagaaggagaggctccccggcttaacaaattaggtacaggtgcatgggagaaactgaaagaacgtacgaagagtaaaatcaaggacattgcccgcgatttgataaaattgtattcgcagcgtcgtcaggaaaaaggtttctcttacagtcccgatagtttcttgcagcgtgagctggaagcatcctttatttatgaagatacaccggatcagagtaaggcgacgattgatgtcaaggcagatatggaaagtgaccgcccgatggaccgtctagtctgtggcgatgtaggatttggaaaaacagaagttgcgattcgtgcggctttcaaagctgttgccgataataaacaagtagccgttctggttccgacaacagtacttgcttaccagcattttcagactttccgtgagcgtctgaaaggcttgccgtgtcgggtggaatatttaagccgcgcacgtactgccgcacagaccaaagctgtattgaagggattgaaagatggagatgtcggtattctgataggtacccaccgtatcttgggaaaagatgtccagtttaaagacttgggattgttgattgtggacgaagaacagaaattcggagtctctgtcaaagaaaagctgcgccagttgaaagtgaatgtggatacactgactatgactgctactccaattccccgtacccttcaattttcattgatgggtgcacgcgacttgagtgtgatttctactccgccacccaaccgctatccgattcagaccgaagtgcatacttttaatgaagaagtgataacggatgccatcaattttgagatgagccgcaatggtcaagtcttctttgtcaataaccggattgcgaacttgccggaattgaaagcgatgatcgaacgtcatatcccggattgccgtgtagcgattggacatggacagatggaaccgacagagctggagaagattattctggattttgtcaactacgactatgatgtactcttggcaactacaatcattgaaagtggtattgatattccgaatgccaacactatcattatcaatcaggcgcaaaactttggattgagtgatctccatcagatgcgtggacgggtaggacgtagtaataaaaaagctttttgttatttgttggctcctccgttaggtagtttgacagccgaaggaagacgacgtcttcaagcaattgaaaactttagtgatttgggaagtggtattcatatcgccatgcaggatttggatattcgtggagccggaaatctgcttggagccgaacaaagcggatttgttgctgatttgggatatgagacatatcagaaaattcttactgaagctgtccatgagttaaagacagacgagtttgctgaactgtatgcggatgaaatcaagggcgaaggacaaattagtggagaagagtttgtagacgagtgtcaggtagaaagcgacctcgaactattgttacctgccaactacgtaacaggcagcagcgaacgtatgttgctctatcgtgaactggatggactgacattggacaaagatgtggaagctttccgtgctcgcctggaagaccgcttcggaccagttccccgggaaacggaagaactactccgtattgtgcctctacgccgtcttgcagcccgtttgggtgcagagaaaatcttcctgaaaggtgggcggatgaccttgttttttgtttccaatccggatagtccgttctatcaaagtaaggcttttggtaaagtgatagactatatgatgaaatatactcgtcgttgtgatttgcgtgaacagaacggcagacggagtatgctgattaaggatgttactaatgtggaaacggcggtcagtgtgttgcaggagattgtggctttgccggtaaaggaagcataaatgagttgaagatgctatcattggcaacaactcattactatgtagcttttatttctttctcttacctatattattttctcgattgcctaatgagttttcgtttgacagttgttgaactaacgcccgacaatagttgaactatcgtttgactattctcaaacgaaaacttactaggtaatcaaatacatatcaattggagagcgctaacttaaaagtagccaataagatcacaagttataattgattcataatcatgccttatgcttgatttataatttatttcattctatctttttcctttccctctttccatgtcctttccttttccatataacttgtctatcaaatctgaacgtccgatacgtctcaactcattgatgatgttttttcgttcttccggtttataccaaaaaaagaactgtcgttgtgcaagtttctcccgttgggttttggcactgaatatcggttctagcgtgtatggatggaatccgctataccaggcttcagtagccactgtcatcggagtaggagtgaagtcctgcacttgctccagatggaagtccagacgtttagtgataacggcaagttccgccatgtcttcttcattgcatccgggatgcgaagagataaaatacggaatcagttgttgacgcagattttcttcccggttaatgcggtcgaatatctttttgaatgtttcaaattgctcaaaagaaggtttgcgcattatagataatacccggtcactggtatgctccggagccacttttaaccggccactcacgtgattgactatcaattcacgggtatattcggcagtgctacggttggtagtttcatctttgctttgatgaagtaacaggtcatagcgtactccgctaccgataaacgatttttttattccgggcaaggcatctactgcacggtaaatatccagtaaggggcgatggtcggtatttagattcgggcaaactttcggatggatacatgacggtcgtttgcacttcttgcaaatagcttcgtcttttcctttcatctgatacatattagcggaaggaccgcccaaatcacttaaatatcccttgaaatcgggtaactgaataacttcttttacctctttcagtatagactctttgcttcggctgacaataaactttccctgatgggcggaaatggtacagaatgcacagccaccaaaacatcctcggtgaatgttgatggaaaatttaatcatatcgtatgccggaatccgtttccctttgtattttggatgaggcaggcgggtatatggtaaatcaaacgaatgatcgaggtctttctggctcatcggaggatagggaggattgactacgactatcttatttcctactgcttgtgtgattcgtgaagccgaatatttgttggattcttcttcgatatgtcggaaattactagcctgtttctttttatctgccagacattcttcgtgtgaataaagttgaagatcgtcttcggcagatatccattctgttgcacgacaaagataggctgtctggggcacagatccgataattgttctaaatttgctgcttgtcagtacaggttcttcagtggtgagcaggcttttcatatttttcaccaggtctgcaagaggcttttctcccattccgtagatgagcagatctgctccgctgtcgcacaaaatactcttttgtactttgtcctgccaataatcgtaatgactcaatcgccttaagctagcttcgattcctccaatgactaccggaacatccggaaaaagtttctttagtatctggctgtaaactgtagaaggatagtccgggcgcatatccggtcggccgtccggagtataagcatcttcactgcgtaggcgtttgttggcggtatatttattaaccattgagtccatgcatccgccggagataccgaagaatagccgtggacgtcccaacttcttgaagtcgcgcaggtcgtcacgccagttaggttggggaacgatggctattttcaaaccttccgcttcgagaatgcgtccgataacggcagcaccaaaagaaggatgatccacataagcatcagcactgaatagaacgacatccaattcattccatccgcgaagttctacttcttttttggtagtgggtaaccagtcggtcaattgatattctttcatgctgcaaagatacggataataaaaaacatcccaatgatttttttattcattgagatgtttaacttcaatcatcaggatgttttcttccaatcattggagtgttttcttaaaacttcccgttgattgtgaactgtaatgtcatttgttctccgtcatagatttcacggaagccgataccttgctcggacagatattcctttagatcctgaaacgcatcagcatggttcatgataatctctatcgtttcacccggagaggcagtgcacatcgcttttattgcaggaatcagcggactgtatgctgttattccgcaggtatctaccgtaatcattattcctcctcttcttccgcttccggactggagagccaggtaagataaagcttgatgagctgttgcaagccgaatgccttcatattattgtgataaatcacgtcgatacaaaggtccagcaagtctttactgtcttcctcctgactggcgataagggagcggatattaagtttcaacttatccagaactgcttcatctacaataccggtactgtcgataagatgacggaacagagcatatttttcaatcgttctcaagttttcattagatacttctatgctgcgtgtaccgctgggatttgcttgtatagtatacattgtattttagttttaaaggttattatagtagcaaagatagaatttaaaatgagaaacggattaaaaaaaaggatattttttatttttgagtaaagaatcccaagatgcctgccataatggttgcccggtctgcttcggactggatactttcaaaaggaaagcccaatacaaaagtacggtagtttcctttgtaggcaatacctgcactctgattgccgggtgcatacgtaaatacggggaaggcagtatctacgggaacaatacaatcggcagcaggtacagcataactgctttcattaggcagacgtgggattgtaatagtacggcccaatcctttaatctgattcgaactcttatccgtcaggctaccttgataaccatatttcagtattttctctgtaaactcccggtttccttgtgttccactcatatcacttcctacataagcaccactgacaaacaggttacctcccgcttggcaataactggtcataatccgttgcatagccgaagagaatgtcttgtaatatgctttacttgcaggatcttctttttccagtcccaaaatataatctactactggataatcttctaatgtaaccaacccgttctctactgcttcgtcgctgcatgatacgaaactatattttccggctgcctgaattgcttttccgtgaataaaaggatagtcgaacgtgtttcctgcaattttcattccttctaattcgtttccgctatgtcccagacttccttttccttctttaccggcttgtgtacggtcgaagccggtttgtgctccgcaaaatgaaatattcgatatatacggaacgccgggatcttgcattagatcgaatccagctttatcagaagtgttaacgaccgccggaccgctgattctgtcaaagccattgatgatgattacttttccctgttcacgtttggctttataagcggagaggatttcagaaggaaaactttccccaccccggtttacagcagttactttgaatgaataaacaagtcccggttctatcttaacggtgtgggacgttttgctgactaaagtgccattgtcaaaacctccataaccgatgcgggtatatacaatgtattcccgtggtcgtgcagtcggttcttgcggatcgtcttcgcctttccatgaaagttctaatgtattctttttctttccgaattgaatggcgaaattgctcacaggtagaggctgaactatgtattctttatcatgctggttggtaatgaactgcaaaatacctttgtaaatggcacgccccactgtaaacttgaagttcggatcatgtcctaactgcatatctgcgaagttctggtgggagagtaattcaataatcgtagaaggtgtagccggaagacgtgtttcgctataattccggttccacatgctgcggcgtatccaaggcaagctatagcttgaataaatatctttctgaatttgtgtcagcagaatgtctgccagatcacgtgaggcataccggtctgttcctgcattcagtttgccattattgaaatctgtggtgtaaatgccgagtgatccaatcagttcgtctgttttgctacatccggcgtcactgtgcaatgccatcgtcatttccaaaggtacgcccagacccgactgttgtgggttatagacggaactgcccgataaataattgataacgttagagcgtgtgttgatatcgtctgtatagtcgttttcaccttttcgtccggcatatacttcgtatggcattcccgcccattgagcagagtagcgtgctccttccaagtaacgcggtagcccgctgatttttcctccacgggcaatgtttcccattccccctccaaaacgtactgcatcggcgcatacaaccccatgttcgctgctctcgttactaagtaccaccatgccgtagtcgttgctccctttatcgaattcaaaagttccgaggtaaacccatgtgcctccacctattttctgattaactttaaattcggttactcctccgttatggaataccagatatttggcgtcgcttacactgttgggcaatgtttggtaggaaacataaactgcatacttgcctgttgccggtagagtaggcacccattcggcaaatacctggtctttattcttctttttctttctctctgtcggaataaaacgacaggttccgtcagtgaaaggattttctccatctttatagattgttttcttctgagcaaatcctcttaccggagcatttgcccaattaatctttttaccccccatttccaaataaagggaagcattgggggtatcattatctacaatgatttcattcttttgtgtatctcgttcgcggggagtatagacaatcgctcctgcattttccagcattggaattacataaggaaggacaaaagattgagtgaacatgtcttctgtggtgcagaataatcggggacgttgccatccccattcgtttttatcatttttgaaatagttgccgtggctttgccagattgcaatgtggcggtcttgtagtccgcgtgagatttcattaggacgtgaagtgtttttcacccagggagctcctttataatctacatttaaggataaccgctccttatcctttttcttattccggtagaaattaggtaccaaatcttcaatgggtttcccatccgcataaatggtgagttggtaataatgaacgggacccggaagcaattctttaacttgattataaatgttttctacagtttccggacggaaaggctggtaggcgaaactctccgatgcatagattgcaatcgtcttacggtcgtaattaatatcgaagctattcagtttaggagtgctgattttggctgttgcggtatattggttgaagtaatccgtcagccgctcttttacatttctttcaatatcctgcgcaaaaagaaaagttgcacagaatgtaaggcctagaaaaaatactattattttcttcatacttgttgcttttttgctaaatgcagattatcacggattatcgcagattgttttattctatttttctttgcgaaaatctgcgttaatccgcgtttaattttccccgcaaaaataaacaaaaaagagcgagaagtatcgaaacttcccactcttctttcattgttttatattctcttaattaagaatgattactcttataatggaacatattctacaaatgcttccattgcttcgtaagaagccaatcccaattgatcgtacaaagtagctgtaccacggttacgatcttcgctacgttgccagaacaaacgttcgtcgttacccaggaacggagcactttccatttgcgactgatgtttcaggatagagttacgttttgcacgaagttcttccggactgataggcactgccatttcaatattctcgatttcccattcagcccacgcaccacggtacatccagatacgacagtcttttagccatttggcaccttcttctttttcaagatcgacagcagcaaatacagcgtctgtacatacacggtgagttccatgtgggtcggctaaatcaccagcaacaaaaatctggtgaggttttatttcacggagcaagttgcgtacaatttctacgtctgcttcactgattgggtttttctgaatcttacctgtttcatagaatggcagatcgaggaagtggcaacgttccagcggtatattattataagtacaagctgtacgggcttcaccacgacgaatcagacctttgatagtcagaatatcacgactgtccatatcaccgtctttcttctccttcaggaaattgcgtatttctatatatttttcattgataaccaaatcttcgctattattgaagagctgattgaatccattgataaaatgcatgaaacgaactacttcttcgtcacctacggcgatattaccggaagtttcgtaagctacgtgtacttcgtgcttttgttctaccaaacggcgaagcgtaccacccattgaaataacatcatcatccggatgcggagagaagatgaccacacgtttcggatacggttttgcgcgttccggacgataggtatcatcagcattaggcttaccgcccggccatccggtaatggtgtgctgcaaatcattgaagattttgatatttacattgtacgcagaaccgtaaagtgccagaagttcactcaaaccgttttcgttatagtctttatttgtcaacttcaaaatcggtttgccggtcaactgacacaaccaaacgattgcactgcggattaatttatcattccattcgcaagaagtgactaaccatggacgttggatacgtgtcaggttcatagcggctgaaagatcaagagctacatgtgcattattgtgagtttgcagataagaagcaggaattgtgtcagtgatcggaccttccacacactctttaatcatagctgctttgttttcaccccatgcaagcagataaactttctttgcgccaagaatagtagctactcccattgtaatggagctgatcggcgtattatccagcgttccgaaaatcttggatgcctcgtttcgtgatgcattatctaacaaaatcagacgagtggtagaattcagtcgggaacccggttcgttgaacgcaatgttacctacacgaccaatccctaacaaagcaatatcaatacctccgaagctttcaatgcgttgttcatacagacggcaatattcgaagatggtatctttggcaatgcttccatcgggagtgaatatattctgcttgtcaatgtcgatgtgatccagcagcatactcttcaaagcattgaagttactgttgattgcatcgggagacaacggataatactcatacatattaaatacgatcacattgcggaagctaagtccctcttccttatgcatacggataagctcggtatatacgtggctgggtgaatctcctccgggaagagccaatacacagaaacgtcctgccttttgtttctcgcggatggtttgtgctatttcgcgcgcaatatagttagcaccttcttctacggattcgtagatgtccgtagggattttttcgagtcttgtcaagactgatttttcaaatgcattctccggtctgtagtatctgggggagacccggtggagactgatttgagaactaagatttgttttcataaagttgttaattaagttatgtaagattagcgtccttacgactgtattttcacgacaaagatacaaaagaagtctatataattaactaccgagttctaggtattgttgctgcaagaatctgtttttaacatttgttattttgccaatgttacagatggaattcgtctgcatctttccataccgggaacttctctctgaattggttgagagtgttcagattaagactcacagtagctattccttccttttcatctggaaatgagccgatttcttctccgaaagcagaataaactctacttcctccattatatgtaagctgatatccgtctatacccaccctgttgacaccgcatacatagcattgattttccaaagcacgcgcccggagcagagtgtcccaaaccagacggcgggggataggccagttggctacatatattaaaaggtcgtactcgttgtttacgttccggctccatacaggaaaacggagatcatagcaaaccaacaggcagatattccatccacgataggggatgataagtcgtttgtcaccgaccgaaaaatgttcggcttcccttcccatacgaaacaggtgacgtttgtcataatagaattcttctccttccggtgtcaggaagaaggcccgattatagaactggtcgttttcagttgctatataacttccacaaatggctagctgaaattgggcagcccattgtttgagtattgtaatggttgctccggagttcggctctgccagcattttactctgcatgctgaatccggtggaaaacatctccggtaaaacaacaatctccgttattccacgaagactttgcagcttttcgtggagcaaacggagattttcttgtttattttcccaaacaatatcggtttgtatgatagaaatacggatagactccatgataactaagtattaagtaataagtattaagtattaagccgtgcggataagtatatcaaaagctacgattaatacttaatacctaatacttaaatcatatttctccaagagcaaaattctccggatgttttcctttgaaatccttgaaataaagtttgatttctctcatgtccttattaatatctcctgacggcatgatagctttcgttgccgaaatcgttttcttgctgtaatcaataccaatcaggacgataggaacctgtgctttcaaagctataaaataaaaaccttttttccagtttggattcgctttgcgggttccttcgggagtgatagccaaattaaactttttatatttagcaaaattatgaaccatctgatctactagcgaagtttttcggctacggtcgacgggaattccgccaactgctttgaaaaaaactccaagtggaaagaaaaaccattcttttttcatcatgaaacttgtcttacggcctatagcaccataaaatagttttccaataaataaatcaaggtttgttgtgtgtggagcggcacatatcacgcatttatcataattaggcaccgtaacgtttgtcttccatcctaacaggcggtaatagataaagctataaattgcttttttcattctgttgttagttcaatttccctatagcttcaataatctcgtttacctttgcattaaaatcagcacggaatttcttataaaaacctttcacgttgcccggttctgtgtggctgatgcgagtgacaaactcatcctgcatcttcagtacctctgccatcagttcatctgcttttaccttgtctgtgccagggataaacatactgttgattaaacactcggtgaataattctcctgcgatatagtttacgttctttttgagttctcttctacttgccataatctttacatttaatggtgaataataaaaatacttgcggtaaagataggcactttctttgattctagcgaataatatagggaaaaacattattcaggccttcatcttcttaactctatctcttcatttaaataatttcacaggctattattgatggaataacggtttgattgtgatcctgaatagtatttatatgatttacttgttaatctgcgtttcaataaattcctatttagttcatttcggatcactaatgaataatttatttagttcaacagttgatagggtaagtcacttacttaaccaatgttggttatgtatgagccaaatgttatttttagtgaagcggtagcccgagaaataatatagaatttacctaacggacaaacgtacgttatctaccgtgtgaatatccgttacccaccggacgagcatcaacaacctgccggacgagagtcggtcatctgccggacgaacaactcatgagggacacgggaatagaaacggcaccgacaaagtgatccggaccgacagcggtagcaaccaaagccattttctctgccctatattattgctattatttataacagaaataatacttttctcttctctactttactctactggttttcgttggcttttccccctttactggcaggcgtttcagcgctttgtacagccctctttggataccctcgtttttgtatcggtttcacttgttttctcaccgaagtacaagaataactttcacgtgaatgacggtgtttctcttatttttcttttttataatagctgcaatcataaagtaggttatttttgttctttctcttaatttattgtataatctaaaataactaatgatgcaaaaaattaataaaaatggatttagccaatgtgccggagcgtacattgagcgtttgcggaaagaagggcgatattctaccgctcatgtttataagaatgctcttttttcttttagtaagttttgtggaacattgaacatatcgttcaggcaagtcacgcgagaatgtttacgttgctatggacagcatctttacgagtccggattaaagctcaatacgatttctacttatatgcgtatgcttcgtagtatctacaatcggggagtagaagcgggaagtgccccttatgttccccggttgtttcatgatgtttatacaggcgtggatatccggcaaaagaaagcattgtctgtgaccgagttacacaaacttctatatgaggatccgaaatccgaacgtttgcgtcgtacgcagacgattgccgctttaatgtttcagttttgtggaatgtcattcgcagatttggcgcatttagagaagtcggctttagaccggaatgtgcttcaatataatcgtatcaagactaaaacaccaatgagcctggaaattctcgaaagtgcaaaggagatgatgaatcagcttcgaagcaataaacctgctcttcctgattgtcccgactatttattcgatattttacatagtgataagaagcgaaaagatgaaaaagcatataaggaatatcagtctgctcttcgtagatttaataattgtttgaaggatttggcgagagcgttgcgcttaaattcgcctgtcacttcatatactttccgacattcttgggccactactgccaaataccgcggagtttctattgaaatgataagtgaatcgttggggcacaaatctattaaaaccacacaaatatatctgaaaggctttggattaagagaacgtacagaagtaaatagaaagaatttatcttacgttagagattgcaatgcaggcaggtgatatatagacaaaactttaataatcagcatttaaatgtatctgttacttcttaggtaacggaatcaaatatgacgcaaagatagacaaaaatataaatagcaaacaaatattctcccattttttttcgttttatctgatgcatacggcaaaaaaaaatccgaacatgaaataattatatcttcatgcccaatgatttatatgtcctgttttaaaaagaattttccccttcgctaaaggcaaaagctcttctctcactgtaattgtcgatgtttttctctgttctcattccggttggtctcgattgtgtgtttactgttacctaagaagtaacagaattatataaggtaaaaatagtggattaatcaaaaaagttttgagaatatctctatttaaaagtataacatacaaataaagatgaaacaaactaaagcggcttttaggaataagccatttatttcgttaaaaggtagtattctatttctgatactcattccgatgagcggtctgattcatgcgcaatattccatgggaacaacggggcagttgatgatacctaccgctgaaatgcaagagaccggtacatttacgggaggagtcaatttcttaccagaacaggttactccatcggttttcagtttccctaccatgaactattttgtagatatgactcttttctcttttatcgaattcacttatcggatgacattactcaaaatgacaaccggcacaggcagaacgggttatcataatcaggaccgttctaatacgattcgcattcgtccaataaaagaaagccgctattttccggctgttgtgattggtggagatgatcttttgactgagaagaagactccatattggggagcttattatggtgtgttgacaaagactatcggatttcgttcaggagatcaattggctgtcacagccggatggtatattcatcaaggcgattgccgggtatttaataaaggacctttcggaggtgtccgttacacgccttctttttgcaaagaattgaaattgatggtggaatatgatacgcatggatggaatatgggggctgccatgcgcttttggaagcatttgtccgtcaatgtgtttactcgtgaatttacgtgtgtttccgctggtctgcggtatgaatgtacattaatacattaaaagaagatgaaaaggattgttagtgtgactgctgtttttctctgtggtatttctttgttacaggcacagccagttcgtgtgagtgagacactgaaagaattggaaatggagaatatttcagttgtggagaaaagggacacgataactgcagcttttgagacctctgcctatagaggtatttataatggaatcggtattgctatacgccatttggttgctataccggaaataccgactttgcagctacttatattagataatgccctaccacaattatgtataactatccctgcagatttgattcaaaaatgtcagtccggtgaatgtacgttggatgaagtgtatcgtaagatggggatgactacttctaccggaactgctgtgcgtcagctgaaaggtgtaaaacgaaaagaaagttctttcggtaaggtagattttgtgatatatcccaacgtgatgttagtcaataatgtaacttataagttgtataaggcggcactcgagttgcaacctgccctggaaatgcaattatggaaaggagcttcgctacggatgcaggtttctttgcctattgtaagtaatgaagatggtaagtggaactgcgttcgcttgggattcatggctttgcgtcaggattttcgcttggctaaccattggaaaggatacctcactggcggtagtttctctaatgaccgtcagggacttgctgcaggaatcggctatttttcagcaaacggcaggtggacggtagaaggtggaggaggaattaccggttcttcccatttctatggcagtgactggaaaatgagtaagtggaaaagagtcaatggacagattagcgtaggatattatgtgccggaagtgaataccttggtgaaagtagaaggggcccgctttatttatggagattatggagtacgcggaactctttcacgctatttcggcgaatatattgtaggtatatatggtatgtacacagatggagcaacgaatgcagggtttaatttctctattccattaccgggaaagaaacgcaggcgacatctgctacgggtgatgcttcccgaatattttgcttttcagtatgatatgcgtagcgggaatgaatacgctcatcgttcattgggcgaaagttatagtgttgaacctaagtcggcagagaattcacacttctggcagccggattatattcgatattatttgattagaacgagtgagaagtgaaacatgattgatatttaaactagtatttttaacaaatttgaacattatgaaaagtgtaaaatggttttatgtgggtgccatggcgatagccttgggtatgttaacttttgcgacagtagcctgtcacgatgatgatgacgatccgaaaccggcagaaggggaagttgttgaaactccgaaaccggttgtagagtattacattatggggacggtgacttccggaggagcagcaatggatggggcaaaggtaaaagtgggtagtaaaaattacacaaccgactcgaatggtaagttctctgttacagaaagtgctacaggtacttatagtattgaagcgtcttctaatggatatctttcacagaaaacgtcagttgtcattgcaaataatgcagagaatcgtagtgtggtaacggtagctctggctttgacaaaggagagtccgaaaactgctgtgtcaatagaggctacaggagaaactaaagtagaggataatagtgaatcgaatcaggcaattgaaaagccgggagaagttgctccggaagaagtggtagaggataaaccgctcgtgaaagtcgaactgacaataccggaagatgcaattgaggcatctcaacaacaagcaggaattgttgaagatggtaaagtcaacattagtgtgacaacctttgttcctgctcctgaagaagtaactactgaagtaaaggcagaggacgtgaatagagatgtacctaaaagcatacctttagctgctgctaaatttgaaccgtctggtttgaaatttaagaagtctgttacgatttctattcctaatcctatccctggaataacattcgctgatgctgatatgatacttacttatcagaatccaaatacaggagaatggggggatgcaaaagataataatggaaatgtaattaaaaatatatcttctactacagaaagtggagctgtcactgcatatacagccgaagtcgatcacttctctgcttatgctatagagaataaagtatatagcaagattagtaatgaaactgtgacaactaatattctaggacaagctagtcgtgataatagcgagaatgctaaagcggtggctggcattgaactgaaatataaggaaaagtctggttgggactatgataagaatgatgctggtcttgttgctgaagttaaatcgcaattaggagctggtgctagtgctgaagatacaaaaacggtgaatgcaatggttgcttttatgaaaactcgtatgttctcattaatgggatcggtatctggcattacggaaactgaacgtgtttataacactgtaaatgtaaacggatatactaccatgagttatacttgctatgcaaaagtccgtactaccacgttgacggctaatgtaaagtttaagggtactgcaaagtctgtttcgattacagcaactcgttataccggtacggaccatcaatataaaacggttacttataatccgacacatagcggtggtaagggtggtagtatctaagatgttttatagtaaggggcttagattcatttgtagcattgaatccctgccttagtcgattagaaaaaagtacagaggtacttctttacctaattggccccatgcatcagattttattttgatgcacatttccccaaatatcaactgtctgtgaagatcgttgatatgactttgataccgtttgtcaagttgatggcagtataataagtttttaattattcattttaagataaaacccttttgaatatgctccttttccaataaaccctttggggcatgttcatatagagtatagaaggaggaggtcactgtgaagcggtctcctcttttgcttttcgaaaatactgtattacattagaagtaataccctaaattcacaaagcaacttcctttgtccgtctgattggaatatcccaatgatatttccaatggcccgaagatactgtccattccatagcctgcactgataccgaataattgcttgcctttcaatatatcgaagaaattactatctgttagtccgtagttacccgtcagtgtaagataatgaatggctcccatgcgttgtctgaacttaatagatgcaatcataatggtgttatccatcaattccagattggtaaccccggcaaatggtaattgctgtggaatatagaaaccaggtacgtcaccgccaatggcattttgcagcgggtagggaaaatctcttccgatcaggatacgtccataaatggaaggaatgatagagaaacggcgggttacaggaatgacgcttgcccacgaagcattcagtgctgaaaatggagcgtgttcgttgtattgtgccatattatccgtatagagtgaataggcggctctgaagtcacttcctttagaagggaaacgtcctttatcataggtattatattgcacttgggcaaaataacttagaaagtgttcggattctactttcaggtcggaaatttcaggtttcttgaacaagaaatctttgtatttgtaatattcaaaacgaagaccgagtccgaaacggaaattcttgtaccatacatcagagaagccgaattcggccagatgatatttgtaagttgtattataggcacggtcgccttcctcgtaaatattgatatcattgtattggaacatatacgagaagttgaaattacgctgttgcattggttccagcgtatagtctatgcgggcagcatatcgtttacccaaccgaccggtaagagccaggcgggaaggaatacgagttttgaggtctgctgttgcattgaccaacaaagatgcgatctcttccgaatcgaaacggatgcccaggttgattcttctttcatatttttcctgtaacaggaagttgaggtgataaccttcaggtgtctctttcaacgtataactggcactggagtaggactgactgccacgtaactgatacagggcctgttctatttgttgagtggaaatatcgctgttttctttcagattacatttcttcatcaaccattttttatcatccacctctacaccggaaaatgagatgtccgtcacataaaccgtacgcgcattagaaagagaagaataaggaccatgttgtttcggggtataatcttcggctattcctattttctttttcaaagcaagcaatgaaccccattgggcttttgctgcttcttcgcctctacgcatcagggtatcaatggcggctggagtaaaactggcggatgaatatccatctacattgacacggatataggtatctgtgagatctacatttttttcatggttagactgacaggtgatatctacaatttgtcccagaatgtcggggacgctattgagcttgtcagccttcttcagagcattctgtacgtctactccgataataatatcggcccccatggctttcacaacatctgccggatagttgtttacaatgccaccgtccactaataccatactgtcttgccgtaccggagtaaatacaccggggatagccatactggcacgcatggcagtagagagtattccgtcatggaatacaatttgttctccattaacaacattggctgctacacaggcaaaaggaatgggaagtttattaaagtcgatagagtcatgataccctacggtaaggtctgaaaatagattagccagattctgtcctttcatgattcctccggtagcggcatctttgggagttttggtgaaaggaatagagactgtatatttttcagatcgctcacgatctgttaatgacatggcacttcttttgatacggtcactcaataggaatgtccaatcttgttttcgtaccatgctatccaattgttccggagtataaccgatggcataaagaccgcctacgatagctcccatgctggtgccggctatataatcaataggaattccggcttcttcgatcacttgcagtgctttgatgtgtgccattcctttagcaccgccgccgcttagaacgacacctaccttttttctttgttcctgagaatgcaaagaaaaaggcaataagatgccaattgataaaactaatgttgaaaagatttgttttttcattaggacatggtctagtattgatgtttaatataatacaaatgtagagcataatttgtttagttgttgaaatgggaattaaaaaaaatgttccaaaagtcggaaatgtggataatttctacattttatctggtggattctacatttctacatttcttaaggcaaaatataatagactgaataccagtaaataataggtgtaatgaattttggcatactaattgcaagaaagagtatagaacaaacataagttaaattaaataataagattcgatatgagattattcttttcgaaacatgagttgaaactgaggagaaagagaaccattgctgctattatatgtgtggtacttgtgttgggtgtgtattggatactgacccgacctcagaaggctgcgccggaaatgccgacagtcattgtagaaccggtagtgaaagatgatgtagagatatacggggagtatgtagggcgtattcgtgcccaacagttcgtcgaagtccgtgcccgggtggaaggctatctggaaaatatgctttttgccgaaggtacatatgtcaataagaatcaggttttgtttgtcattaatcaggaccagtatcgtgccaaagctgataaggccagagcgcagttgaaaaaagacgaagcgcaggctttgaaggcggagcgtgatttaaaacgtatccgtccgttgtttgagcagaatgctgcaagccagttggatttggataatgcggaagctgcttatgaaagtgctgaggcaacggtagccatgagtgaggcggatttggcacaggctgaattggagctgggctacaccattgtccgttcgcctttgtcgggacacattagtgaaagaaatgtggatttgggtacgttagtgggacccgggggaaaatcattgcttgctactattgtgaagagtgatacggtgttggttgattttagtatgacggcactcgattatctgaagagtaaagaaagaaatattaatttgggacagcaggattctacccgttcctggcagcccaatattaccataacattggcagataacacagtctatccattcaaaggatacgtggattttgccgaaccccaggtggatcctcaaaccggcactttctctgtacgtgcagaaatgcctaatccgaaacaagtattgttgccgggacagtttacaaaggtgaaattgttgctggatgttcgtgaaggagcactcgttgttccaatgaaagccgttaccatcgaaaagggtggagcatatatttataccatgcgcagggataatgcagtagagaaacgttttatcgaattaggaccggaagtcgggaataatgtggtggtagaaagaggattggcagaaggagaaatggtagttgtagaagggttccataagttgactccgggtatgaaagtacgggtgagccaaccggatgcagaagcccaggatagtataactgcgacaaaaaatgaagtggccggggcgaaagaaaatgttaccggaacgaaggataacgcgaaaggagaataaacgatgaaagttactttttttatagataggccggtcttttcggctgtaatctccatcgtgattgtgattgtcggtattattggtctgacgatgcttccggtggatcaatacccgcagattactcctccggtggtgaagattagtgcttcttatccgggtgcgagtgcacttactgtatcacaggcagtagctaccccgattgagcaggaaatcaatggtactccggggatgctttatatggaatcaaatagttctaactccggaggtttttcggcaacagttacttttgatgtatctgctgatccggatttggcagctgttgagattcagaatcgtgtgaaactggcagaatcccgtttgccggcggaagtgattcagaatggtatttcggtagaaaaacaggctcccagtcagttgatgacgctttgtttgacttctaccgacccaaagttcgatgagatttacttgagtaactttgctaccatcaatgtgctcgatgtgattcgccgtattcccggagtgggacgtgtatccaatatcggtagccgttattatgccatgcagatatgggcgcagccggataagctggcaaacttcggactgaccgtacaggatttgcagaatgcattgaaagatcagaatcgtgaatcagcagcgggtgtgctgggacaacagcctgtacaaggattggatatcacgattcctatcacgacacagggacgtctttccactgtaggacaatttgaagatatcgtagtacgtgccaatgcgaatggttctatcattcgattgaaagatgtggcacgtgtatcgctggaagcttcttcgtataatacagagagtggtatcaacggtgaaaatgctgccgtgcttggtatttatatgttaccgggtgctaatgcgatggaagtggccgagagagtaaaagaggcaatggatgagattagtaagaactttccggagggattgagctatgagattccgttcgatatgacgacttatatttccgaatctatccatgaagtatataagacgttgtttgaagcgttggtattggtggttctggtagtttatttatccttgcagagctggcgtgcaacgttgattccggtagtggcggtgcctatttcattgatcggtactttcggattcatgttgattttcggtttctcattgaatatcctgacattgctcggattgatccttgcgatcggtattgtggtggatgatgcgattgtggtggtggaaggtgtggaacatatcatggaaacggagcacctaagtccttatgaagctacgaaaaaagcgatgaacggacttgccagtgctttgattgccacttcgctggtattggcggctgtgttcgtcccggttagctttttaagtgggattacaggacagttgtatcgccagtttacggtgacaattgtagtatccgtgcttatttctacggtcgtggctctgacattgagtccggtgatgtgttcgctgattctgaaaccggatagcgggaagaaaaagaatatcgttttccggaagattaatgaatggctgggtatcggtagtaataagtatgtagctgccgtaactcgtacaattaagcatcctcgtcgagttttgagtgcttttggtatggtgttgattgctatcatgttgattcatcgcattattccgaccagtttcttacctgtggaagatcagggatatttcaagattgaattggaactgccggaaggggctactctggaacgtacccgtatcgtgacagagcgtgccattgcttatctggaaaagaacccgtacattgagtatatacagaatgtaacgggaagtagtcctcgtgtcggaagtaaccagggacgtgcagaactgacggtgatcctgaaaccttgggaggaacggaagagtaccactattgagaagatcatgcatacggtagagaaacatcttgaggaatatccggaatgtaaagtctatctgtccactcctccggttattccggggctcggtagttcgggaggttttgagatgcagctggaagctcgtggagaagccacttttgataatttggtagacgcgacagatacattaatgtactacgcatccaaacgcaaagagttggcgggcttgtcatcttctttgcagtcggaaatcccacaactctattttgatgtggatcgagacaaagtgaagatgctgggtgtacctttggctgatgtgttttctaccatgaaggcttataccggttcggtttatgtgaacgactttaatatgttcaaccgtatatataaggtttatattcaggcagaagctccttatcgcgaacacaaagacaatattaatttgttttttgtgaaagcctccaatggagcgatggtaccattgacttctctgggaaatgcatcatataccacaggaccgggaagtatcaaacgtttcaatatgtttactacggccgttattcgtggagcagctgcgcaaggatatagttccggacaggcgatggagatcatggaacagattgcccgcgatcatcttcccgataatatcggactggaatggagcggcctttcctatcaggagaagcaggcgggaggtcagacgggtatggtgatggcactggtattcttgttcgttttcctcttccttgctgcacaatacgaaagttggacagtgcctattgctgtgttgctttctttacctgtggctgctttgggagcctatttgggagtatgggtttgcggattggaaaacgatgtctatttccagattggcttggttatgttggtcggacttgccgctaagaatgcaattttgattgtagagttcgcaaaggtgcaggtagataaaggtgaagacttggtgcaatcggccatatacgcagccaaattgcgtttccgtccgattctgatgacctctcttgcctttgtgctcggtatgcttccgatggtactggcaagtggtccgggttcggcaagccggcaggcaatcggtacaggtgtatttttcggaatgatatttgccatcgtatttggtatcattcttgtgccgttcttctttgtgatggtgtataaaacaaagtcgaaaatcttaaaacataagaaataatgaaacgaaagaaactatatattgctatcctgttacttgccggagtactgacttcctgcaaggtagggaaaagctatgtccgtcctgatcttcatttacccgacagcttggaaagatcacaggattcggttagcttcggtgaccaggactggagggatatttatacagatgctacattgagaagtctgatagagcgtgcattggatcataataaagatatgctgattgctgctgcccgtgtgaaagaaatggctgcgcagaaacgaatttctacggctgcattgcttccggatattaaaggaaaagtgacaggggaacgcgaactcgagaatcatggaggagatgctttcaagagatcggatacctttgaagcacaattcctcgtttcgtgggaagtcgatctttggggaaatctgcgttgggcgcgttcggccagcattgccgagtatctgcaatctattgaagcacaacgtgcattgcagatgacgattgtggctgaagtggcacaggcttactatgaactggtagctttggatacagagcttgatattgtcaaacagacattgaaagcccgtgaagaaggggtgcgcctggcgcgtatccggtttgccggtggattgacttccgagacttcctatcgacaggcacaagtggagttggcacgtacggccactttggttcctgacttggaacgtaaaatctccctgaaagagaacgatattgcttatcttgcgggtgaatatcctaataagatagcccgttcccgtttgcttcaggagtttaattctccggaaacacttcctgtagggttgccgtctactttgttggaacgccgtcccgacattcgtcaggcagagcagaaattgattgctgccaatgcaaaagtaggagtggcctatacgaatatgttcccgcgtcttgccctgacaggtggtttcggtagtgaaagtacttctttgtcggaactcttgaaatctccctatgcagttatggaaggagctttattaactcctatctttggttggggaaagaaccgtgcggcattgaaagcgaaaaaggctgcttatgaggctgaagtacatagttatgagaaatccgtactggaagctttcaaggaaacacgtaatgcgattgtcaacttcaacaagattaaggaagtgtacgaacttcgtgccaatctggaacgttcagccaagagctacatggacctggcacaattacagtacatcaatggagtcatcaactatctggatgtgttggatgcccaacgtggatactttgatgcccaaatcggattgagtaatgccattcgtgacgagttgattgcggtggttcaactttataaggctcttggcggaggctgggagcagaatccctagaattatattataaattagctcgctgaagaaaacgtaaaggctatctcctacgtcgggagatagccttaatttttctttcttctttcttttgtcttaaaaacaacagaagaagaatttttataattcggaaaaaaatgcgaaatttgcaacgcttttcaagtttgacaagaaacttactaacacctttaaataaaaaattaaagaaaatgactaaaagtgcattgcaaatcgcaagggctgcttaccagcccaaacttccgaaagcattggcatcaggagctgttaaggctgtagcaggtgctgctactcaatctgtagccgatcaggaagctatcaaagcattattcccgaacacgtatggaatgccgttgattacattcgaagctggtgaagctgttgctcttcccgctatgaatgtaggtgtaattctttccggtggtcaggctccgggcggacacaatgtaatctccggtttgttcgatggtatcaagaaattgaacccggaaaacaaattatatggttttattctgggtcctggtggtctggtagatcacaactatatggagctgactgctgatatcatcgacgaataccgtaacacaggtggtttcgatatcatcggttccggacgtacgaagctggaagctgaaagccagtttgaaaaaggacttgaaatcatcaaacaactgggcatcaaggcactggttattattggtggggacgactctaatacaaatgcttgtgtattggctgaatactatgctgctaagaagtatggtgtacaggtaatcggttgcccgaaaacaattgacggtgacttgaagaacgatatgattgaaacttctttcggtttcgatacagcttgtaagacttatgctgaagtaatcggtaacatccaacgtgactgtaactctgcacgtaaatactggcacttcatcaaattgatgggtcgttcggcttctcacatcgcactggaatgtgctttgcaagtacagcctaacgtatgtatcatttcagaagaagtggaagcaaaagatatgtctttggacgatgtagtaacatctatcgctaaagtggtagcagaccgtgcagcacaaggacacaacttcggtacagttttgattccggaaggattggtagagttcattcctgccatgaaacgtctgattgctgaattgaatgacttcctggctgctaatgctgaagaattcggtcagattaagaaatctcaccaacgtgattatatcatccgcaaactttctccggaaaactctgctatttatgctagtctgccggaaggtgttgcccgtcagttgactttggatcgtgacccgcacggaaacgttcaggtatcattgatcgaaactgaaaaactgttgtctgaaatggtagctactaagttggctgcatggaaagaagaaggcaagtatgttggtaaatttgctgctcaacaccacttcttcggttatgaaggacgttgtgctgctccgtcaaactttgacgctgactattgctactctttgggttacacagcttctatgttgattgctaacggtaagactggttatatgtcttctgtacgtaacacaacagctcctgctgccgaatggattgctggtggtgtgcctattactatgatgatgaacatggaacgtcgtcacggtgaaatgaagccggttatccagaaagcattggtaaaactggatggtgctcctttcaaagcatttgcttcacagcgcgaacgttgggctatcgaaacggattatgtatatccgggtccgatccaatacttcggtcctacagaagtttgcgaccaggcaactaagactttgcaactggaacaagctaaataaatacacttcaaagtagttgttaatacaacagctgcaatgaagggttctttcaggcacggattacgcggattaatacggtttttagttatttcttataaccctgtattccgtgtaatccgtgcctatctctaaaaacattgatcgtttaaagtaaatgccgcaacgcaacaacccgatgtctgccgtacagaagaaaagaactgtttccactaccaaaagaaagggaacgacttcttcttccaagacttcccgtacctcaaaaaaggaacaggtgaagcatcgaactgtgatgcctacctggcttcgtaatattctggcagtgataattgtcggttgtttctccgtcgctttctattatttctttatccgcccttatgcttatcgatggaaaccttgccatggcttaaaggaatatggtgtctgcatccctgacggatatgatattcatggtattgacatttctcactatcagggaaagattgactggaagaagctgttgcagaataaggagacggctactcctttacatttcgtctttatgaaggccacagaaggaggagatcataacgataccacatttgaggcaaattttgccaatgcccgtaatcatggatttatccgtggcgcttatcatttttatattccgagcacggatgctttgaaacaggcggacttctttattcgcacggtaaaacttgtttccggtgatttacctcccgtacttgatgtggaagtgaccgggcggaaggaaaaaaaggaattacagcaaggcatcaaacgctggctggaccgggtggaatctcattatggggtgaagcctattctatacacttcttataaatttaaaacccgttatctggacgattccatcttcaatacgtatccttattggattgctcattattatgttgactctgtaaggtatcaggggaaatggcacttttggcaacatacggatgtaggaagtgtccctggcattaaagaagacgtagatttgaatgtgtttaatggctcgttagaggaacttaaaaagctgacaattaagtaacgggtatttcttttcccaacaacttatctcttctctcatttgttataatcgtattattactaaaaaagatacgattatgaactttgatatagctattattggtggtggtccggccgggtacacagctgccgaacgggcaggggccaacggattaaaaactgttctttttgagaaaaaggcaatggggggagtatgtctcaatgaggggtgtattcctactaaaactttgttatattctgctaaaatactggatagcatcaagagtgcttccaaatacggcgtttctgccgaatctccttcgttcgatttatccaagattatgagccgtaaagataaaacagtaaaaatgttgacgggcggtgtgaagatgactgtgagttcttacggagtgactattatagaaaaggaagctctgatagaaggagagaaagaggggaaaatacaaatcacttgtgacggagaaacctattccgtgaaatatttgctggtatgtaccggctctgatacagtgattcctcctataccgggactgtcagaaatcagttattggacttccaaggaggcattggagataaaggaactccctaagacactggttattattggtggcggggtgatcgggatggagtttgcttctttcttcaacagtatgggcgtgaaagtacatgtggtagaaatgatgccggagattctgggagcgatggataaggaaaccagtggtatgcttcgtgccgaatatgccaaacggggagtcactttctatttgaatacgaaagtggtggaagtaaatcctcatggagttgtgatagaaaaagaaggcaagatgtctgctattgaagcggagaagatcttgcttagtgtaggacgtaaggcaaatctatccaaggtaggactggacaagctaaatatagaactgcatcggaatggagtgaaagtagacgaacatctgttgacttcgcatcctcgtgtatatgcgtgtggtgatattacaggctactctttattggcgcatactgctatccgtgaagcggaagttgctatcaatcatattttaggagtggaagaccggatgaattacgattgtgttccgggagtcgtttataccaaccctgaagtggcgggagtgggaaagacggaagaagaactggtaaaatcaggagttccttaccgtgtttcaaaattaccgatggcttattccggacggttcgttgcggagaatgaacagggaaacggactctgtaagctgattcaggatgaagatgggaagattatcggttgtcacatgttgggaaatcctgcatcagaacttattgtgatagtaggtattgctattcagagagggtacacggtggaggaattccagaagactgtgtttccacatcctacggttggagagatctatcacgaaattatgttttaactcttattccgcttgatctatgattcgatgtatctatagtccgtttactgatatttactttcacttggcagcagaagagtatctgttgaagcagggaaatgaagatattttcatgctttggcaggatactccttctgtggtaataggtaagcatcagcggttgcggtcggaagtcgataagaaatgggcggaacaggaacgagtacatattgcccgtcgtttttcgggtgggggagcggtgtaccatgatttgggcaatatcaatctgacttttatagaaacggctccccgattgccggaatttgttacgtacttgcaacggacattggatttcctgaactctataggcctgatggcaaaaggaggcgaacgactggggatttatctgaatggattgaaaatatcagggagtgcgcaatgcgtacataagaatcgggtgttgtatcattgcactttattgtatgatacggatctgacagcattgcataaagctttgaatccggaaccgatggttgatgatgaaactttatcgtcagtatatgccgttccttccgtttggagtgaggtaaccaatattcggagttatttaccggagggaactgtaactgattttaaagagaaggcttttcagtatttcagtaagtcccaatctgtcagtgcttttaccgggaaggaaatagaggctgttaatcagctccgggaagggaaatatattcagaaagagtggatatatagtcgttgatgtccgggctggctttgtcagcatccggttaaaatttacttaacttaaaactttctatttcagcccgttgttgtaatatatcaaggttgaataataaatttactgtctatgtcaaaattcgaaataaaaatgcctaagttgggcgagagtataaccgaagggacaatcgtctcttggtctgtaaaggtaggtgatatgattcaggaagacgatgtgctttttgaagtgaatactgccaaagtaagtgcggagatcccttctcccgtagcgggaaaagtggtggagattttatataaggagggcgatacggttgctgtaggaacagtagtcgctataattgatttggatggagaagaatcttcaggaacggagccgataaatgtttctgaaacatcaccatcgttagcggaaactgctaggaacgaatcagcgaatactgcatcgaaacctgttgttgtagaggaagaacgttggtactctcctgttgtgattcagttggcgcgggaagctaaaattccgaaagaagagctggatgctatacaaggaactggttatgaagggcgattgagtaagaaagatataaaagattatattgaaaagaagaaaagaggaggtagtgttgaaccgaagccggcatctgttgttgctgctccggccgcaagcaaaccatcagttgctgtttcttctgaacaggcaagtccgaaggttgctcctgtagcaatgcctggagtcgaagtaaaagagatggatcgtgtccgccggattattgccgaccacatggttatgtctaagaaagtatctcctcacgtgaccaatgtagtagaagtagacgttaccaaattggtacgttggcgtgaaaagaataaagacgctttcttccgtcgcgaaggagtgaaactgacttatatgcctgtgataacggaagccgtggcaaaagcattggctgcctatccacaggtgaatgtatcggtagatggatacaatattcttttcaaaaagcatattaatgtcggtattgccgtctctttgaatgatggaaatctgattgttcctgtggtgcatgatgccgatcatctgaatctgaacgggttggctgttgccatcgattctctggccttgaaagcaagggataacaaattaatgccggaagatattgatgggggtacatttacgataaccaattttggtacattcaagagcctgttcggtacgccaatcattaatcagccgcaagttgctatcttgggagtagggtatattgagaagaaacctgctgttgtagaaactccggagggtgatacgattgcaatccggcataaaatgtatttgtctttgtcttacgatcatcgggtagtagacggaatgttgggaggtaacttcctgcattttatagccgactatctcgaaaattggaaaggctgataactgattgtttcattcattaagaacttcattactcatgaaaaagaaatatgatataaagactacagatgtagaaaccctgaaaaagtggtatcatctgatgacattggggcgtgccttggacgaaaaggcaccgtcttacctgttgcaatctttgggttggtcttatcatgctccctatgcagggcatgatggtattcaacttgctgtcggtcaggtattcactctcggtgaagatttcctgtttccatactaccgggatatgttaaccgtgctttccgccggaatgaccgctgaagaagttatcctgaacggtatttccaaagcaacggacccaggtagcggaggacgtcacatgtcgaaccatttcgccaaaccggaatggcatattgaaaacatctcctctgctactggcacacacgaccttcacgcagcaggtgtggccagagcaatggtatattatggacataaaggcgtagccatcacttctcacggagagtcggctacttccgaaggattcgtttacgaagctatcaatggtgccagcctcgaacgtcttccggtgatttttgtaatacaagataatgggtatggtatttccgtacccaaatcggaacagactgccaaccgtaaagtagccgagaacttctcgggcttcaagaacctgaaaattatctattgtaacggaaaggatgtattcgattcgatgaatgctatgaccgaagcgcgggaatatgctatcagtacccgtaatccggttattgtgcaggcgaattgtgtccggatcggttcgcactccaattcagataagcacaccttgtatcgggatgagaatgaattggaatatgtgaaagatgctgatcccttgatgaagttccgccggatgctgctgcgttataaacgtctgaccgaggaagaactgcaacaaatagaaactgatgcaaagaaagaattgtctgctgccaaccggaaggctttggctgctcccgctcccgatcctaaaagcatttatgattttgtaatgcccgaaccttatcagccacagaaatataaagatggtacacatgaggcggaaggggagaagacttttctggtcaatgccattaatgaaacattgaaagctgaattccgctataatcccgatacctttatttggggacaggatgtggcaaacagggaaaaaggaggcgtgtttaatgtaaccaaaggtatgcagcaggaattcggcgaagcccgtgtattcagtgcaccgattgcggaagattatattgtaggcaccgccaatggaatgagtcgctttgatcctaaaattcatgtggtgattgagggagcggagtttgccgattatttctggcctgccgtagaacaatatgtggagtgtacacatgagtactggcgtagcaatgggaaattcgctccgaatataactctgcgtctggcttccggtggctatatcggtggaggcttgtatcattctcaaaacctggagggagctttgaccactttaccgggggcacgtattgtctgcccgtcttttgcggatgatgctgccggattacttcgtaccagtatgcgatccaaaggcttcacgctgttcctcgaaccgaaagcattgtataattcggtagaagcagcggcagtagtgccggaagattttgaagtacctttcggaaaagcacgtattcgtcgtgagggatcagatttaagcattattacctatggcaataccacccatttctgtctgcacgcagcagaacgattggaaaaagaaggtggctggaaagtggaagtcattgatattcgctccttgattccgttggataaagaggcgatattcgaatcggtcaagaaaacgagcaaggcattggtggttcatgaagataaagtattctccggttttggtgcggagcttgctgctatgattagtggagagatgttccgctatctcgatggaccggtgcagcgtgtcggttctacttttactcctgtcggttttaatccgattttggaaaaggaaattctgccggatgaggccaagatatacgaggctgcccggagattattggaatattaaatagtgtggattatgaaaaagataggtttattctatgctaccaaagccgaaagaacgagttgggtggcagagaaaatacagaaagaattcgataaggaaaagatagagacagtgcctattgaacaggcttggcaaaatgactttgctgcttatgactgcttcattgtgggtgcttccacttggtttgatggagaacttcctacttattgggacgaactgttgccggaactccggacaatgaaattaaaaggtaagaaggttgcaattttcggtttgggagatcagatacgttatccggagaattttgcagatggaatcggtctgttggcggaggtatttgaagaagatgaggctactttagttggttttacttcttccgaaggttatactttcgaacgttccaaagctttgcgtggtgagcagtggtgcggtttagttgtcgatttggataatcagtccgagcaggcggaaaagaaaataaaagcatggtgtcaacaggtaaagaaagagttcgcataacaactttgtttctccttataagataccgtcactatttgttctacatccatcaggactcttatcctttataaacaaacttcacctctgcccagcgattcttctctttataatgaacgaaagtcaatccgttcttttccgcttcttcgcggatggcggtaatatcgtctacgtaaaatccactcatatagagttcggaatccgtatgcatgcaggcaacatattgcttcatatcattcagtaatatattccggttgatgttggcgatgataacgtcgaaaggtccttttcctgtaagcgacgaggcatctccttgtgaaacggcaatatcgtctacgtggttcaattcgatattttcgatggagtttcgtacacaccattcatcaatgtcgatggctgtacaggggcgtgcgccccgcatacgtgcgaggatggcaagaattgaagttccgcagcccatatcgagcagagatttatctttcaattcgctgtccaacaattcttcaatgatgaggctggtagtctcgtggtgtcctgttccgaaggccatttgaggattgatgacaatgtcatattccgctttgggaacatcttggtggaaagtgctgtgaatcacacatcggtttccgataatgatgggttgaaagaaattcttttcccattcttcattccagtccttatcttccgcttcggtgtatgtataagtaatatccgtatcgggtagggggaactcggtgatggcaatcttgatggcgttttcatcacagattgtctgttggatatatgcggtcagtccgccttcacactcaacaaaactttcaaacccgacttcacccagtacggcagctagtacgtcagtgacgatttctgtgcaagggtgggtgcggaatgtgaactcaaaatacttcatagttgtttttaattctggtgaataatggacaaagatagttagaaatagggatttccctattatcctttggggaaaatctccctcggacgaaaaatctcttccttatctttgtaacatgaataagtttaagtaattacataaaccgagatgatatgaaaaagattgtttatttcttgctatttgccttgtgcctcccgataggcttgatggcacaaagcgttgatgacgacctttacttcattccttcaaaagacaaacaggagaagaaagaaactccggttaagaaggaaacgaagaaacaggtgaccaacatctatacttcaccgggtactacagtagtggttcaggaccgtaagggaagaacacgggatgtggatgaatataaccgccgttacgatgcacgtgataatgaattcgtaatggataatgataccttatatataaaagaaaaatctaatccggatttggacggagaatgggtgacaggcgaattcaatggtacggaagacgactatgaatacgctgaacgtatcatccgtttccgcaatccgcgttttgctatcagcatcagcagcccgttgtattgggatgtagtttacggtccgaattcatgggactggaacgtatataccgacggtatgtatgcttatgcgttcccgacattcagtaatccactttggtgggattggcgttatggctcttacggctggggatggaactatggctggggatggaatcgtccttactacgcttggggatattctccgggttattggggcggctggtatggcggctactggggtggctggtatggcggcggttattggggacatcaccaccactggcacggtggtcctagctggggctggggcggaggtggaagcggtcattggacaggtcctacctatacaaaccgtcgttcttctggacaaagcagttacaggaatccttccactgttcgtcgttatggttcgagtgccgttcgttccagcggttcttctgttcggggaggctctgcagttcgttcagaaggtagttctgttcgttcttctggttctacttatagcaggggaactacttccaggcgtgtagtgggtacacggacttcaggtggacgcagtggctcaagtagtcgtagcagtgctacttattctcgtccaagtagtactagaagtagcggaagttcttcatcttcccgttcgactggttcttctggttattcgcgttcgtccggaaccactactaggagcagtagtgcaagatcaacttatagtcgtggtagttcagaagcaccgcgtagttattctccagcgagtaatagtaatacccgttcttcttcctatggtacttctcgttcttcttcacgtagttattctccagcttcgtcaggtggtagtagttctcggggcagttattcgagtggtggttcttctaggtcatcatcaggtggaggctcctctcgtagtggcagtgccagaagataagtattaattaaacggttttacaagaatgaaaaagataagtgttttaattgctctagggatgttgatgatagcgccttggggaatggcacaaacgatatatgatggtgccaaattaacaggaaaagatttaaatggaactgctcgatttgtgggtatgggtggagctatgggagctcttggaggagacatatctacaatggggactaatccggcaggtattggcctttatcgtagtagtgatgtaatgacttcatttgggttttctctttatgggaatgaaagtcagtatttggggaaaaagtttaattccgatttaactaaaggagattttaataacatcgggtttgtgttttcttcgaagattggtaatgaaactccgctgcgttttgtgaatttcggttttaactatcataaagcgaaatcatttaataacaacatgcgcatggaaggtaatttggggctttactcccaaacctatctaatggcatctcaagcagctggcattgaaaaatggggagattcgccttatacggataatggtattgggtggctttctattcttggagctgatgctgggctgattagagatattacaatacatgacaaaacaggaggggtaaacaatattccttatacctataaggatgaacaagggaaggaggtacagtataaggatataaatggtaatcctctttatatctctcctggacattttgaaggaatgttagataatggatatgcaaattttcgttcggaagaacgcggaggaattgaccaatatgattttaatgtatcgtttaattttaatgatcgggtatatttagggttgacgctgggtgcttattctgtagattataataagtatactttttatgatgaggattatggaaacgatgaaggatatagtttgcagagttggaatagaataaaggggtctggctttgacgtgaagttgggggctattattcgtccttttgaatattcgccttttcgagttggattagctatacatacgccaatattctatagtttggattataaaacgagtgcacaagttatatcggatgtgatggatgttgtaactggagaaataaaaggatatgacgtgagatcatgggataatcttccgggaaaaggggatatgattcttcctttcgattttcaaactccttggacttataatgtaagtttaggatatacggtgggtaagagtttggctttgggagcagagtatgagtatcaagattattcttccatgaaatttaaagataccgaaggtaattcttctgcttatgaatttgaaaatagtacgacatctatgttgaaaggggttagtactgttcgtcttggtttggagtataaagtgattccacagtttgcttttagggcaggatataattatagtactgcggctttccatcaagatgctttcaaagatttggctattaactctattcagacagatacagactttgccaattctaaatcaatgagtaattatacattgggtattggttatcgcggatcaatgttctatgccgatctagcctataaattctctacgtataaggaagacttttatccgtttgtgaatggatatgcaaatgaagatggtggtgtaactattggttcaccggaagcaacgaaagttaccaacacgcgtagtcaggtgttgtttaccgtaggtatgcgcttctaatctaataaagagacagttttcaatttcaataataacttttgtgtgtaaaaaatccctggaatgctgagtgtctacagcggttccggggatttttattagtatcactttttattctttattttatctgaatagtggagtccgttcgtcaatgattccgcgtcttgcatacattcttacagcaacaggggttccggcttctatggtaatatcttcatccgcgataataggctcttctttaccgtccaagataactgttcctattttctcgccggctttgatgatctgcggaatcaagttagtcagaattccttcagatactttccggatatcgatgtattccggtttggcatttggggcaacttcaattttaccgctgaacaggtcttgtacacctttgtttttcaagaaaagtttaacgatagctctaccttcgtacggctggttgttttcgtcaagcagaacgacgggcgttgtcattctcttgaatgtaagagcaacatttctagcacctttgttggcttgagctgtaccgaacaaatattctaagccacccttgatttcacggtagcggctgcttaatgatctggtagtagctgcttcgccggtcaattcaggataatgagcatagaaagtaaccgtttcggaatcggtgccagcctcgttccaggtctggctatccatacctatggcaaacggatgataatcctgctcggcaacggacattgagatgacatctccggcagcgaaattgttctttaacggaagtgtcaaactgctgctgttacgagtaagagcattgttgatactttggtcaatagaagtagaaaagtcgatcacttctttactgggatcttgcagttcttcttgctgttgacaactgaacaggcatactgatgccataacaaataaaaggctttttcttttcatttgaggggtaattaataggttaataatagtgagaggttttttaatattctactctgtcttctttggccgcccaggctttgaaggcagtaagggcttcattatgcaataagatttcggaaggaagctttctgtcttcaggcttcagttccagttcgtcatagataaaagagtcgtcgaagccaatattcttggcatcggtcttattgtttccatagtacattttatccaatcgcgcccagtaaatcgcaccgagacacatgggacaaggttcgcaggaagtatagatttcgtatccgctaagattaaaagtaccgagtttggcagctgcggcacgtatcgcactcacttcggcatgagcagtggggtcacaagatgccgtaacacgatttactcctgttgcaactatttccccctctttcgtggcaatcacagcaccgaaaggacctccaccattttcaacattttctttggagagctcgattgctttccgcattaagtcttctctagtcatggcacaaaaaatatattgttagtttcattttccctttgcttctttttacaaagatagaaaaaactaacaatatacaatggaatattcctattaattttttaacagtatcagtaaacttcgcaagaaaatgatacttttttttgctttttttcgggttatagtttacctaatatcttgtccattacccagttagtgagcgttgcactttctccgtcgcaggagcaaacggacttacctaacaagtgatcgaccactgcctgaataagaggttgttgcacatgttccgggttaccgatacagatttcttcccgtcctttttcggtatgtaagccgataggctcataagtaaagacagagaaacaaatcattcccttgtcaccgataatttcaatacggtcttcgcgggcagagtcatgggctacgaaacaccaggaaccgctaccaaccaatccgctatcaaattggaaacaggcgcttaatgtatcttcagcaggataaagtccaccccgattgctcttataaccgcttgcttcgaggatacaaccgaacatatcctgcaacaaatcaatttgatgcggagcaaggtcgtagaagtagccacctccggcaatgtcagcctgcacacgccagggaaggttgtcacgattgtaatccagatcgcgtggcggctgggcaaaacgaatttgcacattgataatattaccgatagtaccgttctctaccagttcctttactttctggaaataggggagataacggcgatagtaagcaacgaaacagggaactcccgtttcattggatatgcggttgatgcgcgtgcattcttcgtacgtcacagccattggtttctcaatataggcaggtttgcctgctttcatggacataatggcatacgtagcatgtgaggaaggaggagtggcaatgtagatggcatttacttccggatcatcgatcagttcttgtgcatcgtcataccattttttgattcctctctctttggcatacgctttcgctttcgcaccgtcacgactcatcacggctacgacttccgaatgttctactttctggaaagcgggaccgcttttggtcttggttacttctccacaaccaatgaagccccatttgataatcttttcactcataatatatacctattgtgtctgcttaaacaaaccccaaagataaagctattttttgtcaagagcaactttattgattattaacttagcagagacagtggtaaaacagacattacgttttatttcaatagaggctctgttttacctgaacagacggtctgtttcgggagaatagagtctctgtttgatgttggcatacacttcaattctagtaagaagcaaggtgaacatggctgaacctccgggtgaagaaccgttagtcaccgggaaaggggagtgaaaagcctgggcggggagaggttttctccggatggataaaaagaaaggagagaatcgcgattccctcctttgcgtgtagtttaattgaaactactttatcattaactctgtaaagatacgacatttgaaagcgaaagtcaagtctttgggaatttatttctggaaatagacatgaatatatccatcttacactctgtttttgattgttttcttctgacctgtaaagtgataaggttattctttatcatagtatttcttataaatcttttggtattcctcttccttttggaatttatccagccatgtattcaaactatcaagtaagacgggggattgtttgctgactgcccatgagtagaactgcgtgaagctgatagctgtattaatatctatttgcggcaatgaatctgctgctgccagtgcaatgctttcgtcgcaaacggcatagtcgatgtctccatgcgctaccattgatatcaattgttcggaaccatatttatcaatctctttgatgtagatagtatctccgatctcattgcctaaattctgaatacgcaaaatagagggggagccttttacgacatgaagtgttcgttgggctaaatccaattgggtacggatatagagtgaatcattctcgccaatctctttgcgttgcaccagcacttgcttgttgaggaaaatgggagaggtgagaagcagagagtcttttaacttgctggtggctaatatgccataagcaatcacatcataacgtccctcgcttaatccttccaaccgctcttcgaaactcataataggtgttatttcggctttgagtcctttgtcccgggcgaatgcctgtatcagttcgtaatgaaagccggaaacggtgtcactgtctacataaaaactgatggaattatattcggtagctacacgtatgataccctccttggcaatggcagcataatcacgcggatgtcccgcaggcttttcttgcttaccgcattgacggaaagagaagataaatgccaatacaataatcactggcactaaatatctgaacagtctcaatttggggcgtgataccataagtcgtatagtttttgttaatcatagaaattccatgaaagaccgaatttcagcacacgtgggttgatggggtagtgaggagacagaaagtaattcggactgctcatgccctggttcacgtgatacatcattacatagaaacgtgtacgctttaaatgtaagtttgcatatacattcacaatcggataacctcctatctgtacctgatcgtctgtcggttgcaggtggaaattctgaatggccggcatataggcaggtgcattgtatttgctgaaataacgcacgtcggctcccaattgcacactaagtactttcttcgctagtttgaactgcatatagaagttatgatatagcgagagatcaggtaaaggaagtacagtctggtcactggatttctgccaggtcacctcattgtccagatggaagattcctagcttgaagtcctgattaaggctagcagataatacctgtatacttccgctgttctgttccggttttgcttcctggttgaagtaagtgtagttcttgatattttcaactcctgctttcagacgtgttctccaacgtgcaatgctcaattccccttcaatacgggtacggaattccttgtccatatcgtcgtcccacatgaaatgcttggaatgataatggcgcatatagaaaggagcaagtttattgctgacttcaccacgggctataagactgacggtgtctttccacaacgggaagttcaggtcaatatctccttttacattgaattgtccgattgcttttcctgccaatcccacttcaccgatagcgtggtaatgaagcacattcccttcacgtttggataattcgcctccaacaaatatttcattttcgttgtatttatcaggcaacggatttccttccatattcatcagtgtatacttgctgattttataggaagcaaatgcagtcaatccggctttggcatatttattgaatccctcaagtaacgcaatacctatggtgtttttgattccgacgtaggtggtactgtctctgacattaggattatccgtatcaaagtaagtattctgataataatttttttcacgcatgtcgtcattagaattaaagctatgccgtgcccgttccacttggatggtgtgtataaaactggtaacggggacaaactcctgtttgacgggagtggtgtcattttcagcctgtggtatgtcacgactgaatccgagattatatcgttgggtcaggaagacataaaagtcatggttgcggttggtcgttgcacttagtacggtaggaatattggttgattcatattctctttgaccttgcgccatttcttccggtgcagtgatatcgcggtcgtcctcaatacctccgttttcatttgttttcaggtaattattgctgtatatagcctgcatctgatatttgtcgccgatatagctaccgaaaactgctgcattaaagtacgccgtattctgattattgtaatatcctcgtccgtataggtagtctacattaaatccgaaagccagttttttgtttacattgacagagaagtaagatttgaaacgctcttccccattcactttattaccggctttgtgatacgtcagattcgtataaggtacgttactgttagtgaaattaaattccgtaggacgaatgaagaaactggagaaaggctccatgaaaatagtcggctccgggtcacggcggtcaaagaagatgcgtgacatacggggagaacccatattggccagataattataatgtccggtaagtccttcagtcaggtttgaattctggaaatgatgaaaggctgtatctgccgggatgatagtccggtcgcccaactggttcttgatacgccacatatacaactttggaggcaatccctgtacttcgacatttgcactatccaatctgtccggaatcatggcagggtctacctgatttccgtattggtcgtatccgttttcgtctactctctggcgaccattatcgaactgtgcgtgaacagtcgtcaaacctataacggaaagtaatatatataatagtaagattcgtctcataattggaggcaaagatacttactttaattgagaattgagaattgagaattgaaaaatatgttgcatcctttacttggcgagcaattatttcttaattctcaattctcaatttttaatttattaaacctcacggatcaactccatccctttcttgatagcttcctcgttcataggaatcaagtgatggtggcgttccggcagggttttcttaagtcctttgataacattctccaacgttacgatggggcgaagcttcaataaaccgccaagtacgatcatgttgaatgctttggcattattcatttcgttggctgcatccattgcgtcgatacgatataccttaatatccttacgggtaggagggttgataattccgtaaccgtcataaatcaggataccgccgggtttcactttgctttcaaatttttcgagtgaaggctgattcagaatgatggcagcgtcgtatttactaagaatcggtgaggatattttgtcatcgcttacaataactgtaacgttggctgttccacctcgttgttcgggaccgtaagccggcatccaagtcacttctttgccttccatcaaaccggaatatgccagaatcttacccatagacaatacgccttgtccaccgaatcctgctataattatttcttctttcattgttctgttgacttttagcgttattctttatcttttaaatcacccagcggatagaatgggaacatgtgttcttccatccatttgttcgccttctccggagtcatcttccaacctgaactacaagtggaaacgatttctaccaggttggaacctttaccgttcatggagttctcaaaagccttgcggattgccttcttagccttacggatagccggtacggattgtacggactgacgggttacgtaagcagttccttccagttgggctgcgatttcagtaatcttcaatggatagccgtgaagttcaacgtcacgtccgtaaggacaagtcgaactcttcatgcctaccagtgtagtcggagccatctggccgcctgtcataccgtagatcgcattattgataaagataatcgtgatgttctcaccacggttcaaagcgtggattgtttcggctgtaccgatgcaagccaagtcaccgtcgccctgataagtgaaaacaagacggtccggccacaggcgtttaacagcagttgccacagcaggagcacgtccgtgtgctgcttcctgccagtcaatatcgagatagttgtaagcaaacactgcacatcccaccggagagattcccacagttttatcttccatacccatttcctcaatgacttcggcaatgagtttgtgtaccacaccgtgactgcaacccgggcagtagtgcatggcgttatcgttcatcagagtcggttttttgtaaaccagattctcgggtttgattatttcttctttagtcataacttcatctccttatctgttggtgaaccgtataaaaaactccatcagcttgacaaagattgccgcgccgcatacgtagataaacattttgaaatcatcttttgctacaaagtaggtgatgatggctgcaacagccaatatcataaataggatgttcagtacgtttcttattttatcgggattcattgtttcgttatttgattattttttctttcaaggcagttacaatctcatccggatcgggaacgatgccacctagacgtccgaaatgttctacctttactttaccgttaacagcgagacggacatcttcaatcatctgtccggcatttagttccgtaacgagcataccttttactttatcagcgtatgcagcaattgctttggttgggaacggccacagtgtaatcgggcgaaggatacctactttaattcctttttcacgagctagttccattgctttctggccaatacgtgccattgaaccgaaagcgataatcaaatactctgcatcttcgcagttgatctcttcgaagcgtacttcattttcttcaatttcacgatatttagcttgaaaacggaggttgttgatttccattgcttccggtttcaattcaagggaagtgataatattcggtttgcggtcttttgcttttccggtagcagcccatggacattgttcaattacttctgcttccgtgcggcgtggcttttgtgcaggaagaacaaccttttccatcatctgaccgatcacaccgtcggcaaggataatagccggattacggtatttgaaggccagttcgaatcctaatgctacgaaatccgccatttcttgtacggatgccggagcgagggcaatcagtttgtagtctccatgaccaccaccttttactgtctggaagtagtcagcctggctaggttggatagttcccaatccgggaccgccacgcattacattcacaatcagacaaggaagttcggcaccggccaaataagagattccctcttgtttcaagctcacacccggacttgaagatgaggtcattaccttctttccgctacctgcacctccatataccatattgatagctgccacttcactttccgcctggagtactaccatgccggttgtttcccacggtttcagttcggcaagcgtttccaacacttccgattggggagtaataggataaccgaagtaaccgtcggcaccgcaacggatagctgcgtgggcgatggcttcgtttcctttcattaatacaacttcttctgccatattcttttcttttattctacttttactttatacactgaaatacatccgtccggacaaaccgttgcacacgagctgcatccgttacaggtatcttccttcacttgccaggcatagttatagcctttcatgtttacctctttattgagggcgattacatcgagcggacacgccactacacacaggttgcatcctttgcaacgctccgtgtcgactacgattgctcctttgatttttgccataatctttattttattacgttatctttgagtacggttattgattatacatctcttttattgattgaacatatccttgtggtagaagttgaggatatctattgccatcttcctggcctgaacagcaggactgtccggattgatctcgatggcatactggtagttgtccagtgcctgcttccaatctcctttctttcggtaggcatttccccgtaaatagtaaagagtatctttctctttttcgacagaactgtcctggagaagctggtccaattgcttaatcgctgtgtccacatccccctgattgataagctcttttaggttgtctatttgctccatttcttttcgtctttcgggattctgaaacgcaaagatagtttttatttatgtaaacagggcaaatgaggacggaaatttgcaacgttttgagtttattgcatattctatgaatatatagtcaggggaaaagaaaaacgattctcatctttttttgtttataacaagaatatatctatttttgtcgccaacaataagatgaatcctattttctctgataatggattattaatagactttggccttgtagaatactaaaatgaaagatgaacatgtgaatgatataaataattatcagaaactgtatatgcaatatgcacctatgttgttgcgttttgccggaaagtttatttctcctttctttgcggaagatattgttcatgatgtattccttaaaatatgggacaaacaagtgtttctgttatcagaatcagaggttaaaaatatattgtttgttgctgtccgaaatgcttgtatagatcatttgcgtcgtattagtttggaacaggagtttgccgacaagcgtgctatccagctcaaattagatgagttgagtttttatgacggtgctgatgaattgtttatgaggaaagacttaatggcacatgtgatggcaaaaataaatgaactgcccgaaaagagacgtgaaatcttcctgttatcttatatggaagggcttaaagcggcggaaattgccgagagattaaacttatccacccggacagtggaaaaccaattatacagaaccttacttttcttacggaaagagcttcagactgctttcgtttatttattcatgttcgtttagtgctgatttatttctattccttacagtctcggaaaataaaattcaaaaaaaataaagaagtcggtgagtaattcctgctgattgctcgttacatatataaaaacaggaaaatagtatctatttatatatggaaagcatgacttcagatttaataataggatttttgaaaggctcgttgaatgagaaagagatcaatcagttttatgattgggtgaatgaaacgcctgaaaataaacagatcttttttgaggcaaagatggtctatgacgcttgcttgtctaaaggaagtaatattgatatggataagagctggcagcggttactggaaaagaaacagaaacaggttccgaggaaaatatacactctcttccggaaagttcaggcttatgcagcggtggcggtgatagctgttgcttttacttccgttctcttttggtggttgggtgatgcttcttccgtacctgttgcccgatatgttggtggcgatggaatcgtagctgataaagttgttttgccagacggcaccgaaattagtatggggagtcagactaacttccgctatgatccgcaatatggaaaagaaaagcgtgttgtttatctggaaggagaagccttctttaatgtagccaagcagaaagacaagccttttatcgtggttgtgaatgggcaagaaatagaagctttagggacgaaatttaatgttgacgcttatccgtctgattccgtggtaaccaccacattattggagggttccattcgcttggttagtgaaaaggtaaacacttcgaccgttttaactccaaatcaacaatatatatatcacaaaaacaaaggttcttataaagtggctcaggtagatgctgccctttacacctcatggatttccggttattactatttccatgaagagaatttagagggtatattagcccgattgggaaatatatacggtgtcagtttccggatacagtctgataagttgaaagaacgccggtttaccgggactttctatcgggggcaaaacatcaaagacattttggatataattaatatttcaatcccgattcgatatagtattaataatcggcaagtgataattaattgagccgtataatctaataaaacattattatgaacagtagttagccttaaaaaaagagaagaagattttggcgaatcctcttctctccgagagatgcacgcatctcctaaattaaacttccttcgaacggaatagtatttaatcttaaaacttacaaatgtatgaataaacagcctattctctatgggtttgccctaaaaagaagcataaaaaatacaaaaataacctttgctgttttgttgttatttattctgcagggcatagttggtaacgtgtatgcgcaggaaaagaaaatatcgatatcagtaaaaaatgaaaaacttgagactgtgttacgaatggtagaaaagcagaccaactatttgtttttctatgattcggacgaaatcaacaagcaacaacgaatcacaattaatcaaacgaacagttccttgaaagatgtcctggatgcggttgcaagtaagaccaacctgtcatataccattaaaggacgtcatatcattctggctaaaaagcccaacgtctcttctacaaacaaagacggacgcgcaagcggttcggaaaagaagataacaggtatcgtaaaagatgaagcagaccttcctgtggtgggggctaatgtgatggttccccgaacaaaaaagggagtgataacggatatgaacggtaatttctctttggaagtagcagcaggagatgaggttgaaatctcatatcttggttatacgacacaaaaaataaaaatatccgctcaaaactttctgaatgttgtattgcgtgaagatgcgaagtcattgaacgaagtagtggtggtaggttacggctctgtgaagaagtccgacctgactggttctgtcgcttctgtctccaatacaactttgcttagaggtggaaaaacgaactccgcaggtgcgttgcaaggagagttgtccggtgtgaccatcacacgttcgaataacaaaccgggtggaggctacgatataaagattcgtggtatcaactctatcactgcctcttcgtctcctttgattgtcattgacggagttcccggtggtaatctggattttgtcaatccggacgatattgaaaagattgacgtcttgaaggatgcttcggcaacggctatttatggttccagtggtgcaaacggtgtaatcattgtaacgaccaaaagaggacagactggtaagccgaaaatttcctataacggttatattggtgtgagatcttatacaaatttgcccgatatgatgtccggtgacgaatatgtgcagctggcgagagaggctacccgtggcggagctcccaactatatttataagagagacgagcaaatttttaccgacccgtccgaattgcaggcggtgaaagaaggtaaatatttcgattggttggacgctgtgtccagtcccgcctttatgacaaaccatagcttgtcggcaattggtggcacggaagctgtgaaatacggtttctctggcggctattatttcgaagatggtatgattcagccgcaagaatatacacgctacaacttgcgttcggtaatagacatcactattaataagcatgtttctttcggaggaagtatgtatgcggttcacagtattcgtgaaaaaggtaactgggacttgttgcgtgatgtgttccgtatgcgtcctactcaacatcccaatagcttggtgacaggtgaggagatatggaaatattccggcaataatcttttcaatccgttggttacttctcaaaaccagcgctcgcaagtgaagagcctcaacctgcaaagcaatatttatcttaaaataacacctattgagaatttggagctcacttcttcattttctccctattttacacagacttccatgggggattatatcggagtgtggacaaaggcacagcagggaactgccaaaggtgctaaggcgaatgcgacgaaagataattcattgagttggatttgggataatattgtgaactatacttggaagaagtccgttcattctattactgcgaccggagtgttctccgctcaaaagtatcagtacgacagattgtatggtgcaagcaaggacttgtctttcaattcactttggtataacctgaatgggggagctatcgagagcttgacttccaatttcagccagtggacgatgatgtcttatgtaggtagaatcaactatgggctgatggatagatatttgcttacagccagcttgcgctatgatggttcttcacgtttgtccgaaggaaataaatgggcgcttttcccttccgcagctattgcgtggagaatcactgaagaagactttgccaagaatctggattggttgtccaacctgaaactgcgtttcagttatggtcaggcgggtaataccaactctgtgtctccttatgcatccgaaggtaccatttcggggtctgtatattatccgttcggaacgtctacttccgtgggaaatcttcctgccaacattgccaatccgatgctgacttgggagcgtacttcagaatataacgtaggtcttgatttcggtttcttaaaccaacggatttcgggtaacattgagtactacaatcgtactaccaatgacctgttgatgaaacgcaatattcctgttcatttgggttattcatcggttacttcgaatgtaggttccgtaagaaacagcggatttgagttgcagttgaataccgcgaatatcatgaccaagaactttgcctggaatacgaccatcaacctggcttacaacaaaaacgaaatcgtaagtctggctgacgaagaagatcttagcaattattccattcatctgcaaggcatgagaggacgctattctgacaagcgtttcatcggtaagccggtagatacgaactggactcaaaatacaattggcgtatggcagttgggagaagaagaagaggctgcaaaatatggttgtgtaccgggtaacttcaagattaaagactataacaatgatggcaagctgacggacgatgactatatcattgacggcaagagaacaccggactggacaggaggtatgacaaatatgttcaaaatctatgatttcgacttttcattccacatgtatttccaggcgggagccacacagtacgaccgtttctttgagaacttcgcattagaatggaacagccagaacttcaacaatctgcggactaattattggacgccggagaatccttcgaataccatgggacgtccctcacaaatgggttccagaggtaatatcgcttatgaaagaacagacttcctgaaagtttcctatatcacactgggatatactttgaacaagagactgatgtcaaaatggggactggataacgcccgcatctatgtgactgtacagaatcctttcattcttacgaagttcagaggtcttgatcccgaacagcccgatcttaccaacataggagatacggacggtatgactatgaatgctttacttggtgttaatatttcattttaaaaaaacagatctatgataaacaaaagatatttgaagtatacgcttctgttattcacttttggaatgactgcttgttctgattttctggacgaagtgaaccattccagtcagtcagcggacaaatactatcagacaaagggtggatatgagagtctgattgtaggttgctactcaaacttgaaaaatatctataatacgactacttatcagatatttacacaacaaggtacggatgtcttcacacagaattatccgacggaagtagcggcaatgaatcagtataccactacttatcagtcaaataacggtacgatttatgcgatgtggagttcttatttcaatgcgttgaacaatgtaaatgctgctatcgatcgttcgaagagtgtcattttgaagacagacgaccctgatggaatagaacccagtgcgttgacgcagcttgtggctgaagccaaagcgttgagagcctggtatttgtttgagattgtgaggaactggggacagggaccgttgaaaatcaacgagtctaaagagccgagctatactgtcgagtattcgaatggcgccgctttctaccagcagatttttacagatttggaagaagccattagtgttcttccctggcgtcaaacgggttccaactacggacgcatgtccaaagctgctgcgaaacatatccgtgcgttggcttatctgacacgtggttatgaagagtatgccgatccgaaggattttgaaaacgcattcaaggatgcggaagatgtgtatcttaattccggacataagttgctggacgactatgcgatggttcatcgtcagtcgaatgagataaacgatgaaattgttttccctatcggttttgctgacggagctaactacaacaccaatatctggaatcaatggtatatgatgccttatgctattggcggatggctgggattgggcaaagacagttattatggtaatgcgagtatgcatgtggaggcgattcctactaaatttgcttatatgatgtatgactggcagaaagacagacgtccttctgtgacctttatgagtcctttgaatggtaatgcgagtacttccacagacggaaaggatgcaggcaagaactggttccagtgtactactcctgtagatggagtgttcgccaaaggcgataagattatctatttcccggtacctaccgatcctgaatataagtattgggctgaaacggacaagaatggagtaagatacaaagtgttcaactatccgatgggagacgatacaaattgggcgaatgatgattactacaaacacgcttatcagacgacgaactcaacttctcgtacctgtcttcctatctggaaattcaaagatggaaacgcggagtatagggaagacgaatccggttcgggaacgcgtgatatctatctcttccgtttggcggaaacttgtctgattgcggcggaagcggcagtgatgaataacaacgatcaggctaatgccgaaaaatatattaactacgttgtttcccgtgcagaaaaacattctccgcagggtgggctttctcgttattccaatgtcacgatagataatattttggacgaaagagcaaaggaactccttggtgaaggatcacgctggaacgacttgcaacgcaccggcaaactggctgaacgtgtattgaagtacaactgggatgtatccaacatctatggtgggacaatcaagactaccttgacgcaagagtcgtttgagaataagtttaaattgcgtccgattcctttgcagtggctgaactctttgtccaatggtcacgaattgggtaacaatccgggttggtaattgaatgttgaacctttaaaatgatattcatatgaaaatgaaatatatactaccgatattatgcttgttgtttacgtttgtttcgtgtcaggaagataatacgcctccgccgcccaatccgaaccccaactatacggaagtgggaccttctatggagtttgttcatcccggtattctacacacgacagcttccattacccgaatgcagaactttgtgaatgggaatgtttctccagcggtggactgttacagactgttgcagcagaattctttggcctctgcttcatatataattcaaggtcctttcacaactattgctcgttttaatccagatatgactcctcatcctaccaaaactaagagcgaggaggatcacaaagctgcctatctgaatgctcttatgtggaatatcaccaaaaatgaagcgcatgctcaaaagtcgattgagatattgaatgcttatgccggcacattgcgtgagatagacatgagtgataatgacgctcccttgtgcgctgctttgcagggatttcttcttgccaatgccgctgaactgatgagacatacttatccttcggtatcagatacggatgtcaaatcttgggagaatatgttccgtaacgtatttattccggtattgagaaacttctttgccaaatctccttatgcaaacggcaactggggaaccgctgctatcaaggcctttatggcgttcggtatctttttggatgacgaaagtttctataacgaagcggtgacgtttttctatgaggggcacgacaacggaagtttgacgaactatattatggagagcggacagtgtcaggaaagcggacgtgaccaaaaccacacgatgctggggataggacatctggcagaagcctgcgaaattgcttataatcagggcaacgagacgctttggagtgcatcggaaaacagacttatgaaagggtatgagtatacagctaagtataatctcggatacgatgtgccttttgaacctttcacggatgtgacgggagtgagatggaataatatctctgatgaggatagaggaaaattccgaccggtatttgagattgcttacaatcattacgtaactcgcaaaggtctggaaatgccgtatacgcaacaggtgatatccagaatctctccggaaggggatgcaatgtggtgtgatcatccgggatatgggacactactgttccgtacagaatcgggtatgccgccgagtgaaggagctattgatgcgaaaggaaccgaatggaaggtcgctacggccaatgcaacgactgcagcagacggagataatttggtggtgacaccttctttgcaaagcaatggaaaatatagaggtgatatagagaggaagtcaaccttccacgtaggtaattatcctattgtagcggtagttatagaaggtcttccagcgaagaaagcgataacatttgactctcccgaatatggatctttaataaatgataaaggtaaccagcacggacatggcacttattctaccgttgagaaggagtatggtactgtttattactgggatttggtgacgggagcaagttacacgttaggtaagccgatacctacggatcaatcattcaatatgtctctcaagttgaagattgctgatcttgaatatccggacggcgtatcgccttataccgttaaatggatgaaatcctttagaaacgaagcggaactgattaaatatttggaagaaaactaatcaccttccaattataaggtaaaaaataggtaaaaagaggataaagggagggtgtgtcttgagttactgtagactttcgatacaccctcttgttattatatacatcattaaaatataggtaaatgataaagaaaagaatactctctttgtggataagtttatgcgttatctgtatagccggtgcccaagaaaaagaactggcttactgtaatcggcaaatacataaaacattgaaagcaataggaacttcttcgaaacttccgagagctattgaagccggcaagtcatcgtgggatatggtgagtccccacgactggacaagcggattttttccgggagtcctgtggtatgattacgaatacagccatgaaccggagataaaggaaaaagctgttcattttacaaaattgttagagtctctgtcgagtaaagtaaccagtcacgatatgggattccaaatgttttgtagctacggtcatgcttatcgtctaacgaaagagaactattacaaagatgtcctgctgaaaagtgcggacgaactggcaaaactttacaacccccgtgtaggcaccctcttatcatggccttggaaagtgaaagaaagcaattggcctcataacacgattatcgacaacatgatgaatctggaacttcttttctgggctgccaagcatggaggagggaagaggctttatgatatcgctttgtcgcatgctcgtgtgacgaaagctaaccatttccgtacagacggttcttgctatcatgtagctgtctacgatactattacaggaaaactcatcaaaggaatcactcatcaaggatataacgacgcctcgatgtgggcgcgcggacaggcgtgggctgtctacggatatacgatggtctatcgtgaaacacgtgacaaagaatatcttcgctttgccgaaaaagtggcagacctctacatccgtcgtctgcctgccgacttgattccttattgggacttcgatgctcccgatatcccaaccgctcccagagatgcttcggcagcagcggttgtcgcttcagctttgttggaactgtcgacgctggaggacgataaggagcgggcagataaatattataaattggcagagaagatgctccgcaacctttctacgaagaagtatcaaagccgtgataagaatcctgctcttctgctgcactctaccgggcactatccagccgacgatgagatagatgcctctattatctatgctgattattattacattgaagcgctcatgagatggaagaagatacgtgccggacaatctttgtccgaagcgaacaagttcatgcatccgggtattctccatacgaaagagagcctggagaggatgaaatattacatagatcatcggatagagccggcttacagttcttaccgattgctcgaagctgattcttgtgccttgtccacttatcagatgcaaggcccttttgaagtgatagctcgtttgggagtgaacaaacataccaaacgccctagcgaagacgatcataaggcggcttatctcaacgccttgatgtggaccctcaccggagatgaagcccatgcccgcaagtcgatagagatattgaatgcttacagcgccatgctgaaattaataggtccgaacgacaatgacgacccactgtgcgcctctctacaaggcagtatgttggcgaacgcggcagaactaattaaacatacctattccaaagtcactccggcggagattgccggctgggagaagatgttgcgaacggtattcattcctgtattggacaccttcttcaaggcgaaaccatatacaaacggaaactggggggctgctgctaccaaagcatacatggcctttggtatttttctggaagatgaggctctctacaatcaggcagttcacttctattacaacgggcacgacaacggaacgattaagaattatatcggcgagaacggacagtgtcaagagagcggtcgcgaccaagaccacgtaatgttcggcttgggtaatttggcagaagcctgcgaaaccgcttacaaccagggggatgagaagatgtacgccgcttttgacaaccgtctgttgaccggttacgaatatacagcgaaatataacttgggagaatccgttccctttactacgtggactgatatttcgggccgatattgcaactggcaaacaatttcggacaaattacggggagtgtttcgacctatctatgagatcgtatacaatcattatgtcacccgcaagggattggacatgccgtatactcgccgggttctctccaagatgtcagtagagggcgcttccaaatggtgtgatggccccggctatggaacattgttcttccggacggatatggatgatgattatattcgatatgctgatccattcgttggtacctccgacaacggacatacttttcccggagcctgcgtacctttcggtttcattcaagcaagccccgaaacgggcaatgacgaatggaagtattgtagcggatataactttgcggatgattcctttatcggtttcgcccagacgcatttgagtgggacggggtgtcccgatctgggagatgttcttctattgcctttcagtggggaagtgaaagacggagtctatagaagcaagtttgataaaaattctgaaaaggcgtctcccggatactattccgtccgactgacggatgctgctgtggatgtggaattgacctccacgcagcgtacctcttttcatcgttacgtttatcattccgctactcctgcccgcctattggtagaccttcagaacgggattgtttgggataaagaacggctgaaaacacatgtcttgtctgctgaagtggatatgcccgacaatcataccatcacaggtcatcaagtggtagaaaattgggtaaagcgacaatactattatgtgatctcttttgacaaaccgtatgttgtacgtgaagtgctttcatcggcaggaggggagaaggcgaaacgacttattcttgatttcgaccttgctgaaggtgatacgttgcaagtgaaaatagcgctctcttccgtttgcctggaaggcgcgaaagcggcgttagcgaaagagaatccgggatgggacttcgacaagattcgtatggaggcctgccggcaatggaacaatttgtttgatcgggtaaaggtgactggtagtgacgaacagaagaagaatttctatacttcgctctatcacctgtttatccagcccaacgacatggcggacacggacggacgttatcggggtgctgacgataaagtgtatacctcgaagacgggctcttattattccacgctttctctttgggacacctatcgtgcaactcatcccttgtacaccattctctccccggagcgggtggacggaatgatacagagtatgctcgaacactatcgcacgatggggtatcttcctatctgggcattgtggggaaaagaggcacattgcatgataggcaatcatgctatccctgtcatcgtggacgcctatctgaaaggattccgaggatttgacgtagaagaggcgtatgccgctattcgtggaagttctaccgtaagccatcaacattcggactgggaggtttatgatcgttatggatattatcctttcgacatcatccccaaagagtcggtttcccgtacattggagtccacctatgatgattattgtgtagcccgcatggcgaaatctttaggaaaagagaaagattatgcttatttctcccgccgggcttcctactacaagaatctgttggatccctcaacgactatgatgcggggaaaggattcgaaaggaaaatggcgtacaccttttaatacattcttattgtctcatgccgctacttccggcggagattatacagaaggaaatgcctggcaatatacttggcacgtgcaacacgacgtggaaggattaatcgatttactcgggggcaaagagaagttcgctaacaaactggattctttattctttttagaatcatccgcggaaaatacagggtttacgcaagacgtgaccggacttatcggacaatatgcacatggcaatgaacctagtcatcatgtagcttatttgtataactatgccggacaaccttataaaacccaacaactcattcgtgaaatttttgaccgtttttacctccccaaaccggatggattatgcggaaatgatgattgcggacaaatgtcagcatggtatatattctctgcaatgggattctatccggtaaatccgattgggggagaatatatattgggagcaccacaggtggaagaagttactatttcattaccgaatgataaaacgttcacgatgcaagcaaaaggattgtcgaatgagaataagtatgtgaagtcggtaacgtggaatggcgaacccgttgagaatttccggatacatcattcggaaattatgaagggaggggagttagtatttgtgatgaccgataaatattgagtgttttcgattagctctcatgcacacatatcggctgtctgtattatgggggagtatttgattttaatcaatagtccccttttctatttcctgttttaaaaaactgtagacatatatggctccttgataatataagccggaacgttcgtcttctaattttgcgaaagtttcagaagaatacagtacatccatagatttttgcaaatcccatccgtagtcgctcataagcatttctatcagttcttttcctaaagattcaactaaaaattgtttttccttattcataactttttagtaaattaattgcagcgggagttccaaagaaatattgtatagtagggcggatattatgataattcattcactaattgtgatatgtttatatatccctgaataaatcgtcttaattggagacctacagtatcatcagcaatgggacctattacaatatcataatcatgggcttgaatattggtattattgtttctatttaatagaataaattcagcccattctatggtatatccgccaaactgtttgattttaatatcacttttaccatttagaatagattcatcaaacataaacttagaaataacaggaaccccttttccttgtctgaatgtcgttaaacttgccatcttttcggcttgtttaatatcttcactcagataaaacccttttccgaagtctttgccttttcttcctttatcaatatctatttgggatatttctatatttgaaccgtggtaaagaatcatgctaaagctcctccatttcgttgacagattttcgttaaatcatccacagcttcctctatggagaatgtatgttcgatatcatagaattcttctaagaaatccaagccggaaaaacgcttcaggtatttgtatgcctgactgttacttaaggaatatttttcagcgaaagctcctatacatcccacaaaatattcaattctgttagatagttctctgttactcataattctttcattataggtgatgaataaatttgttagccttatatgaggctttattcaatccttaaagacaaagaaacaaattaatgagagaacttgcaagtgtagtagataaattttaactataacactaaaaataatcacttgacttctacgaccgtatgattccttttgtgattgaggacaatgtttggattggcataaattcgaccatacttccaggtgtaaggattggctatggagcggtagtgggagccggtagcgtggtaactaaagatgttccggcgatgacaatcgtagccggcaatccggcacgaatcatcaaaagatagaaacaagcgaataatataatggctgtttcctgatgagataggaattatacctgaagaaactgtaattaataaaggtgcgttctaactctaatgaaggtaaggtagttgaaataaatatcttatctttttctcttcaaattcctctcacctcttcaacatcttctgcatcgctttgttcatcggtgatagcaggtgaagacctaagcttcacctgccttttcatcagggtttcttttgttttcaactagttccattttttgtttcatactttgaaacgaatggtttcccatagtgaaacagtttgtttctcggtgagaaacgaatcgtttcaccgtatgaaacttttagtttctagcgcttgaaacaaaaagtttcagcaggctggaaactagttagaacgcagctttaccaattatactcatccgtgtaactgtcaaagaccggttcttcggtgatacctttccggtgaaaaagttggcggatatagttttgatctgcggggcttaggaagcgttcttcgcgataaaagcgatagtaaagagtttttccgaaatgcccgatcagttgttgcttgatgtttgttccgtccttataaggtacgttgtccagcaggtggctgataccccatgccacatgtatcttttctgcgttttggaagtgaggacagtcaatgccggtggccggaatacacattgggtttacgatgctgatgtaggacgtgtcagcggtagtgagaagtgcagccacccgacgcaggcagttacaagctttcggacattgctcgttgtagcagcgggcgtagttgaaagggactgttttgttttttaatttattgtcgttcattttatattgtatattacatacatgattgacaaaggtagtgcttttattgtggaaaggtacaatttgaaaaagaaaaaacgtgaaaggtaagcgtctccgcgattctatcttgtcgcccttttttcattcttatatttttgctatgtataaaaatgaagcattatggatttagcagaaaatcgatttggaaaaacttggaaacatttccttgaagcattgaaagtagactacaattgttctttagccgatgtttgccgcgatcagcataccacttttggtggtatgagttcctggatgtccagacggggctatagcgttaaacaagccaaggcagatgtggtccgtgattattatggcggcgttgaaccctcccaaccgacaacttcctctccttcattcactcaaatagcacccgccatgttgtcggaagaagagtttagtcttgccgggatcacaatcacctttaacagtggaaccaccatttcggtcaaacgggccacacccggtggtgttattaaaatgttgcgcgattacgaaagaaaggagggagatccatgtattctctaacatcagccaatcgctactatctgtaccagggctttgttcgtatgaaccttggcattgacggtttattcaaaattatacgatcggaaatgaaggacttgtctcccgtttccggagatatctttttattctttggtaaaaaccgacaaagtgtaaaaatactgcgttgggatggcgatggctttcttctgtactacaagcgcctcgaaggtggaagttttgagttaccgacatttaaccccaatacaggcaattacgagatttcttatcaggttttgtcttttatcttaaatggagtgtcattaaagtctgtacggttgagaaagcgtttcaggatctaattcaacattctgattattagttatttgtgctaaagatatcatccggtttatttggccaattcgttgattttttatatctttatgccatgaaaaaggatgagatcatagagttattgaaggaacaaatcaagggattacgagatgacaacaacagactcttggaccaaatagatgctttgataaaggaggtttcttcccttaaagaggcactccttcaaaaaggcgaatctcttagcaagcaacagcgccttactaagggactcgccaaacttgtatccaacacatccgaacagcaacaggctccccaatctgccatatccgaagaagagcggcagaagatagaagcggaaaaagcagataagcgtaaagcaagaaagaataatggggccaaacgtgacatgcattatgagatggaggaagaagaacatgtcgtttatcccgatgatcccgattttgacatcaataaggcccggttgtttaccactgttcccagaatatgcgtccgctatgaatgtgtacccatgcgcttcatcaagcatgtctacaagatacacacctatacgcaagaaggtcgcctgtttgagggaaaaacaccggcttcggccttcttgaattccagctatgacggttcatttattgccggattgatggaattacgttatatacaatcgctacctgttgaaagaatcatcaactacttcgagagtcatggctttacgctgaagaaacctacggctcataagttgatagagaaagcctcaaacctcttcgaaaatctttataagtgcatccggcagacagctttgagtgatccttataaggcagccgatgaaacctattacaaaatactcgtcccggaaaagaacagcaagggaaaaggagtcaggaagggatacctttgggtggttgtcggcataaacaccaggatgatatacttgctctatgatgacggctcccggtctgaaagagttattcttaacgaattaggcagttgcaaaggtatcatacaaagcgatggttactcaccttaccggaagctcgaaagcgatgcttatcccaatatcacacgcatcccgtgcttgcaacatataaaacggaaatttatagattgcggtgagaaggacccggatgcaaaaaggatcgtggagctgataaacgcactttatcaaaacgagcataagcataaagttggggctgagggatggacggtagaacagaatcttatgcatcgaaaaaagtatgcgccggacatactcggagaaataaaagatgtgcttgatgaaatagaagaacggggggatttattacctaagagcgaactgcaggaagccattacctatcttcgcaatgagtggaatgcagtggtggacatctttaattatggtgacacttatctggacaacaatatggttgaacggatgaaccggtacatatccttatctagaaaaaactcattgttcttcggcagtcataagggggccgaacgaggcgctatactctatacgatagcactcacttgtaggatgcataaagtgaatttatttgagtatctcacggatgtgataaacagaacagccgaatggcaaccgaacacaccaattgaaaaatacagggaactgcttcctgacagatgggaaaaggctaatgactaaaaagggatcattagcctttttattttaatacactatatagaatcgcggagacgcttaccgtgaaaggatgggtgaagggaacacccttcacctataaactgcttatagataggataatacaaggaaaagtgaagggtgaagagattgttcattataactcttcgcatacccgcatttccatacctttatataccactacaatcttgtgtagttgcgtggagccaatagcttgtttcaccgtgtccgtgtcggcatagcggttggcctgggcgatggcttcctgacgcaattcctccacacggttttcagaatcgcgatatttggcgtacttcaactcaacgatgtagctgtgcttcatgtcagaatatatgtccaacatgggacagaggaaaatatcgacgtaacccgcttgtgtatcttgctcggagataggacggtagaagcggttttgcgcagtcatggccaaggtgaagccgtgaacgaagaattcgcccttttgcttgtcacgctgggatgcataacgtttcaggcagtcggcaatgtaactgaaataggcttgccaattgccatcataggcgagctgacttgaaagttcgctcttttcgtagctgctgaaatttaagtctgcgtcgttgtaggtattcagcaaataagtgtagagctgctcttgaaccaccaggttcggaatggtcagtttggtcttgcctttatctattccgctaatggttaacattccgaaatagtagagcaggcttataaaattgtccggattggtgatgttgacggcagggaaacctttcttcagttcaccagtgatataaccttgactcactaaagtttgaatgacggaagcatcgtgtgcaaactctttatcctttcgaatgagcatacgcagcttttcatagtcgatacgtatattatcttctatcatttctcgtggcgctttgccgttatctatgtaattcttcacgaagtagagcaccatgttggagttgtacatggtagtttcaccgtaacaatcctgcgcgaagcaataattgtcgtaccatggtttcattatttctatcagttcgtcaacagtatggcggaaaggactgttcgttgaatagtaagtcagcatttcgcgcacttcttcttcggtgaaccccatcatttggttaaattgaggggtaagtgagtagtttgtgccgatgttgaagccactcgtcaggtcatccatcgttacggggcttacaccggtgatgaaacaacgctctatgctggaataagttcctgccttcaccttattgaagaaagcacgcagataaccttcgccatgcgtttcatcagtgtagcggtgcaaactttcggcatcggaaaggatggcgttggtgaagtggtcgtattcgtcgatgaagagatacattttctgtccggcacgttcgcactccgaaaccaaatagtccagttggttgacagccccgtccttttcgtccaatcgttctctgataccttgtggcaggaggtcggaatagacttcacacaagaagtcgaagcggatttggcaatgtgcatccagtccctttcgataatcgttcagttcgccggtgatacctgaaaagttgaggtaaagcaccaggtagctgttgcggtttgctgtgggatgctttccgatgtagaggtcgccgaataagtcgttgaacttatcgcgggtacgcacatcgtagtagtgttgcagtacgttcagcgtgaggcttttgccgaagcggcggggacggatgaagaaaaagaaccggtctgcctgctctatcataggaatgaaacgggttttgtctacataataatagtcttcgcggcggatgactgcgaagttcatcataccgtaaggcaaacgctttctgttgggtactatatattccattggatccatttcctgtcctcctgctgatttcttatattataacttgcttattaatagcgttaacgacacaaagatagtaaaagttcttgttgggtacgaggcatcctcaaaaaagtattggaaaaactcattcacactaagaattgcagccttggcaaaactattctgaaacagctgtgaaggggcggaaataattctcggggttagcttgtttttactgaaagatactgtatttttgtgcagaactaaaaaatagattatgttggacattattttgattgtaattagtgccctttgtatgatagccgggttagctggttgtattctgccgtttcttcccggtgcgcctattgcttatgtcgggttggttattctgcacttcacggataaggtacaatattctacgacacaattcatcgtatggttattgattgtagctgttttgcaggtattggattatttcactccgatgctgggaagtaaatatagtggcggtagtaaatggggtaattggggatgtatcataggaacccttgtcggtcttcttttcttgccttggggcattattctcggtccgtttcttggagcggtgattggtgaactattaggaaataaagagttctcgcaggcactcaaatcaggtgtgggctctttactcggatttatattcggaactttactgaagttcgttgtctgcggttatttttgttatcaatttatcataggtcttattcggtaacctatttgatgttgtaaaacattcgtaagaataacctatctattgcctttacatagagtactaaatcgatgtgtgttcgtctttattgaagtagcacattgaggtagtaccatgaaaaagacttttacttatctttcttttatcattttattggggtggtttccctccctctttgcgggggagatttatgtatccctgcaggggaatgataagaatcccgggacaagggaagctccgttttatacactaaaccgggcgatcaaacaggctcgtgaatggcgtagactgaatcggtcggaagtagctggaggaatttatattcgtttggaagagggtgtttatgcccagcgcaattctttatttcttcgtccggaagatagtgggacgcccgattctccaacagtgatttgtgcggtagatggtgctcaccctgtgattagtggtggagttgctgttacaggatggaagcgtggatgcgataatccggcaattcctgaagagttgaggcagaagatatggtcggcagaggttcccctaataggaaatagaagagtcgaaacccggcaaatgtgggtgaatggcaataaagttcaaagagctgcgcaatttcctgacggaggaatggaacgaatgattgacttcaatccggaggaacaaacgataacgatccctgcctcttatgtgaacagttcccgggaatcacagagtataactggactacaaaatgccagtcaactcgaaatgactgtccatcaacgttgggcaattgctattttgcgtgtgaaaagtatggacgtgaaagacggacaagctatagttcgctttcatgatcccgaaagtcgcttggagtttgcgcatccctggccgcaacccatcatcggaggagagaaaggaaattcttccttctgcctgaccaatgcactggaattgctggaccaacccggtgaatggtttcaggaatatccttccggcacgatttactattatccgcaggcgggcgaaaatatggaaactgctgaagtgattatccctgctttggaaactttagtgaccatagacggtacattgtcccgtccggtaaagcatatacaatttgacggaattacttttgagcatacctcctggatgcgtccttcttatcagggacacgtcactctgcaagggggatttcctttattggatgcctataaattacaagaaccggggcttccggaaaaagcggaactggagaaccaagcctggatcacccgtcccgaaacagcgatacgtgtaagaggtgccgaatatattgatttcaagcattgcaccttccgtcatttatcgtccactggactggattatgaatgggcagtcacagcatcgagcgtcgaagattgtcaatttacggatattgggggaacggctttactggttggcgcatttccggacggaggatttgagacgcacatcccttttattcctgctgacgcacgggaattatgttcccatattactatcagaaacaatttcataagtaatgtgactaatgaagactggggatgtgtaggtatcggtgccggatatgtcagaaacatggatatttctcataatgaagtctgccatctgaactattcagggatttgtgtaggctggggatggacatcgctggagagcggaatgtgcaacaaccggatagaagcaaactatgtacatcactttgcccgtcggctatacgatgcaggcggtctgtatactctttccaaccagccgggttccgtcatgcgaaataatcggatcgaacatttaatcgaggcaccctacgctacgaatgaccgtgctttttatatctatctggatgaagctacggacggatatacaatggaaaacaactggtgccccgctgaacgttttgattcgaaccgtcccgggaaaaagaatgtgtggaagaataacggccctcaagtggcggacagtattaagtacaaagccggaagaataaagcaagattgaaacaaatcaatggattaacatagtcattaatgtactagtatagcaatcaataaactagtgtaataatcattagaactagactagtatggtaatcattcaaactaatatgataattatagtaatcaataaacgatatttaatcaataaaatagatgaaaccaacgaactaccatttatttgatttccttgatttcgataccgagttatcaaggaatgagtcgctttggaaagcatacaagccaacggctgtttatgaaaaggaaggagatatttacgtaacagttccctttcagaagcaaaagctggctaacgatatgatggcggataccgatgttccccaggaggaatatacgttaatcatccgtcagtataacatcggcatcacccgcctgtttcttggcttcggtgattatgtactgacagatgagtcggaaatgctgcaattcagtgaccggattcagaaagtgcccctgtttataaaagaacaaaaaggaaaatggattctttcgacggaagacggaacgaagcgtgccgttatcaatgtggaagagcctctattagaccgatggagcgaattgcttcccgaccctcaagaaacgcttgacatcactttataccctgacggaaaacgtgaaatccgcttgtcagcctacgatcatttttcgcctccccgctacgatgcgttacctgttgccttttgcaaacgcgacggtcggaaagaacgtgcaacgctttcttttgaatgtaagcccgatgaatgttttgccggaaccggagaacgtttctttaaaatggacttaagcggacagactttcttcctgaaaaaccaagatgggcaaggagtcaataaccggcgtacttataagaatatccccttctatctatccagccgaatgtacggaacattctaccacacatgtgcccatagcaagctctcactggccggacattccacccgttccgtccagtttctaagcgaccaggcattgctggatgtatttgtgataggcggtgatacgatggaagatattcttcgcggttatcgtgacctgaccggctatccgtctatgcctcctctttggagttttggcgtttggatgagccgtatgacttatttcagtgccgatgaagtagacgaaatatgcgaccgcatgcgtgccgaacactatccctgtgacgtaattcatctggatacgggctggttctgtaccgattggctctgcgaatggaaattcaatgaagaacggttccccgatccgaaaagattcatcgggcggttgaaaaagaacggctatcgtgtctctttatggcaacttccatacgttgcagaaaatgcagagcagattgatgaagccagagccaatgattatatagccccattgaccaaacaacaagcgaccgatggttccaacttctccgccttggattatgccggaacaatcgactttacttacccgaaagcaaccgaatggtacaaaggattattgaaacaacttctggatatgggagtaacctgtatcaaaaccgatttcggtgaaaacattcacatggacgccctctataaaggcatgaagccggaattgttgaacaacctgtatgccctgctttatcaaaaggccgcttacgaaattacgaaagaagtgacaggtgacggcattgtctgggcacgttccgcatgggcgggatgccagcgttatcctttgcattggggaggcgattcctgtagctcttgggatggaatggcaggttctctgaaaggcggtctgcatttcggtctgtcgggatttgctttttggagccatgatgttcccggcttccatacattgcccaattttatgaactcggtagtagcagatgatgtgtacatgcgttggactcaattcggcgtattcacatcgcatatccgttatcacggaaccaacaagcgtgaaccctggcactatccggccatagctccgttggtgaaaaagtggtggaaattgcgttattcgctcattccatacatcgtagaacaaagtaaactagccatagaaagcggctatccgctcttgcaggcactcattctgcatcatccggaagataaattttgttggcatgtggatgatgaatactatttcggcaatgatttcctggtagctccggtgatgaacagcgagaaccgtcgggatatctatcttcccgaaggaaaatgggtgaacttctttacgggagaacgtctggaaggagcatgctggctgaaagacgtatacgttccattggaagaaatgcccgtatatgtgcgtgcaaatgccgtgatccccatctatccggaagacgtggactgtacggatgaaatggatttaagcaagagcatggctttacgcatagataatgattataaaggattttggactatgatagattgtggtagaaaattaattaatttagtatagtatgaaaacatggaagagtaatttagaagaaacaaaacaacgttatataaattggtggaaccataaaggaatcgttctcaatatgtgggaacacttccaggaaggagtgcaaccacatgcagagatagtacctcccgcgccggcaaaagatttgtcgcaaaagtggttcgaccctcaatggagggcggaatatctggactggtacgtagcgcacagcagcctgaaagcggatattcttccggttgcgaatacccaactggggcccggttctctagccgccattttaggaggagtgtttgaaggcggggaagacaccatttggattcatcccaacccggatttcaccgatgaaatagtctttaaccccgaacacccgaactggattcttcataaagaactcctgaaagcctgcaaagcgaaagccaacggacactactttgtcggtatgcccgatctgatggaaggactggatgtcctggccgcactgaaaggaacggatagggtattattggacacagtgatgcagcccgaaatcctggaacaacagatgcagcaaatcaacgacatctacttcaaagtatttgatgaactatacgacatcatccgtgaaggcgacgagatggctttctgttatttctcgtcctgggctcccggaaagatgagtaaactgcaaagtgatatttcgaccatgattagtcaggatgattatcgccggtttgtgcaaccttttattcgtgaacaatgtcagaagattgattataccctttatcatctggatggagtgggagccatgcatcacctgcctgccttgcttgaaattgaagaattgaatgcgattcaatggactcccggagtgggcgaaccacaaggaggatctcccaaatggtacgatttgtataagaagattctggcaggcggaaagagcgtgatggcttgctgggtgacattagacgaactaaaacctctattggatcatatcggcgcggacggtgtacatttggaaatggatttccataacgaaaaggaagtggagcaggccatgcggattgttgaagaatataccggttcttctaccgctgtaaataccaataaacatcaacaggatgccgacttggcagctaccggacaggaacgtatttgtatacgggaagaacaacaccagcaagaggataaactgaaacctctgtatgaagccattgttgccgggaaactggaacctgcggttgaaatcacccggcaagccattgcggaaggaatagcaccccaaatgattatcaataattatatgattaaagcaatgggcgaagtgggacaacgtttccaggatggaaaggcttttgttccccaactgttgatggcaggacgtgccatgaaaggggctttggaactactgaaacctttattggcaggaagtgcttccactacaatcggtaagattgtcatcggtacagtgaaaggagatctccatgatattggtaaaaacctggtggcttccatgctggagggttgcggctttgaagtcattaatattggtattgatgtgacttgtgacaagtttgtggaagctgtgaaggaaaaccatgctgacatcttgtgcatgagcgcattgctgactactaccatgacgtatatgaaagaggttatccaggcactagaagaggccggtattcgtaatcaggtgaaagtgatgattggcggagcacccgtcagtcaggggtttgctgacgaaatcggtgcggacggatatagtgataatgcgaatacagccgtagcagttgccaaagaactgattggaaataaaaaatagaataaaaaggtacggattgcacggatcaacacggctcttaattacattgcctattaaaaccgtgaaatccatgtaatccttgcctaaaagaaaattagatttaaacttacgttacttatttaatacttgaattatgcatgtgaaattcttagagacattagattggagtattctgattgcctacttccttattttgataactattggtatatgggcaagttctaaacgaaaaaaggggagtagtcttttccttgcggagaattcgttgagatggtatcatatcggcttctccatgtgggggacgaatgtcggaccttccatgttgattgcttccgcaagtgccggatttactaccggtattgtttcggggaattatgcctggtatgcatttgtctttatatgtctgcttgcttttgtctttgctccccaatatttgggtagtcgcattacgacattgcccgaatttatgggaaaacgtttcgggcaatctactcgtaacatccttgcctggtataccattattaccattcttatttcatggcttgcattgactttatttgccggtggagtcctgatccgtcaggtcttcgatattcctatgtggcaatcggcattgctgttacttgtcatctccgctttcttcacgatgctcggcggactgaaagctgtggcctacacgaatgtatatcaaatgatactgttgattgtagtatcagccacactggctatcatgggaatctataaagtgggtggtgtaggagcactggtggacgccgttccggcggattactggaatcttttccatccaaatgatgacccggcttttccctggctacctattatcctgggttatcctattatgggagtttggttttggtgtacggatcagtcgatggtgcaaccggttcttgctgccaagaatctcaaagaaggtcagatgggaaccaactttaccggatggttgaaaatattagatgtacctctttacattcttcccggcattatctgcctcgctttattcccacaattggagaatcccgatgaggcttatatgacaatggtgactcatttgttcccgacaggaatggtcggcttggtattggctgtattgacagcagcattggtaagtactgtcggctctgcattgaatgcattaagtacggtattcacgatggatatctatgtgaagaaaatccgaccgcaggccaagcagaaagagattatcagagtgggacaagtggttacggtagtcggtgcactgatctctgtgataataaccatagcgatcgacagcatcaagggactgaatctgtttaatgttttccagtctgtactgggatttatagctcctccgatggcagctgtatttctctttggcgtattctggaaacgcaccactactctggcagctaatatggctctgacattgggaacagtgttcagtatcggagtaggaatcttgtatttatgggtgtttccggcagaacaatatgatgcatggcctcattttatgctgctttccttctacttattcgttatcatcggaataggcatgatagtagtcagcctgtgggataagtctccgcaattgggcatcttgaatatggaaaagatagaggacaaacctgcacgaattgttcttatcctatggggattacttattgtgactatgatcgggctttacatcttcttcaatggccactagtttttattcaccacagaggacgcagagattattatctaataataaaagactctgtgtcctctgcgtcctctgtggtgaaactattttctacgaaaacaattttcgtacgtacacagcccgcaagtatattccagcttacgcacatgagaacccactccgataataccacttacagatttgatgggaatcatcaggctggaatctgtcaactgaataccacagggcgaagcgaccggaaataaggagaatagtttttgttgttccgatacgtgccatccgcaatagccggggctgtatctgttagtgtgcttccaacctctcttttcgataaatgcagccaactccttttccatgcaatcagcagccttttctgcaatgatgctccccaatgagtctgctatatatgctttcaccatgtcgtcctcttgctgaagcagatgttgaaactcctcaaattcaactcccgcagtggcggtaaaaaaggcaaaggcttccgaaccccgtagttggcgggcaatggttttaccgattgtgagaaccgtatcttttacagtcagtgttgctttttcagtgtcaagcagtccgtcagtgaggaaaaagaaaaaacggggacgaagaaggggagtgatacggtcaagtaacgtatttatttcttctataaccattccatccggcatagaatctttatatcccatcgcctcgtaaatatctgacgatgggatttgcagtttctggtaagtaagttcctgttcaaccattattgaactcttccaatgcggtataaaatgcgtctatattaatagaagacgtatgtggcggaatatcacaaccacttgacaatacgaaattaggatatgcacgggtagtctccaatagttgcaaagtcgcttccttcatagtctccgggcctgccatcttgaaaaggctcaccgggtccagatttcccattgccagtgcatcggccggaacctctttcaacgcttcctccatcttgattttattcccgaagtggtaagcggctgcaccggtataaaccatcgcttgtgtgcaattccctgtgtttccgcaattatgaagtactacggcaaaatgatcatcctgtaccttctctattatttctttcacaaataaagaagaatattgcaggcaatcttcgttggataacagtcccgcagcaggttcagccatgactacaccgttcacaccggttgctttcaatgccatgcaatagcgggtgatgaagtcactgcattttcttaataacgtattggctgcatcggggttaatgtaaatcagcatcatgatttccgacatatcatacaaacgtccggccagcgaataaggaccgatgcaaccggcaaaaaccggacggtctgttacatttctggctgtcagcatatttgctttaagatattccgggattcttcctttgtttaatgccggaatctccagtttctcaatagctgcctcgtctgccagtaaacgaccggatacactgggtacctcattttccggaaagataatctctgccccgaaagcttccgcttctaccgtcagatccatgatgacggttgcggccgccgccgggtacttgccacaaagagccttgatagcctcataatgaacctgtccgtttgttaccgcatcatgcaccgttttcccgataaattcgatacccggatgtgtcatgatcggaattgcaatcgtttccttaccttggatcgtttggctgatccattctttcatattcagtctacccataattttagtttttaatatcgtcttgtaataaagacgaagttacccctcttttgtaatctcgtatatgataaaatctgataccggtataaaaataaagctgctcttctttctgaagggcagctttacacctatttgatttatcttcgagctttattttaccggaatcttatcaatacggttctgatggcgtccgccgtcaaatttggtagagaagaactctgtcaaaatcatgtccgcttcttcagtgctgatgaagcgtcctggcataaccagtacattagcgtcattgtgctgacgagccaggtgtgcgatttctgcattccagcagagagcggcacgaaccccttggtgcttgttcagcgtcatattgattccgtttccactgccgcagatagcgataccgggataacattctcccgattccactgcaagagccagcggatgagcataatccggatagtctacgcttgcggtagagttagttccgaaatccttgtaagcccagccttttgcttccagccagccgcgaacatattctttcagttcaaaaccggcatggtcgcatgctaatccgattgttttcattagagcattgcttttacttggttatatacgttctcggcagtaaatccaagtttctcatccaatactttgtaaggagcagagaaaccgaaagattccaatccccaaactttaccgtggcaacctaccagaccttgaagagtgacaggcagaccggcagtcataccgaaaatcttcgcatctgccggaagaatagcttcctgatattctttcggttggttgcggaacagaccttcagaaggagcagatacaatgcgtaccttcacgtcctctttgcgaagcaactctgtgccggctaccaatgtagacacttcagaacctgaagccaccaggataacatccggattttcgtcggaacctgctacgatataagcacccttggctgcttgttcgtaatcagttcctgccggtaaattggcaatattctgacgagagaagatcaatcctgtaggagtagacatattttccatagcaagtttccaagcaatggttgtctcttctgcatcagccggacgaagtaccaacatagagttgtgtcccttatgatttttcagtttttccatcaggcggatttgagcttcctgttctaccggttcgtgagtaggaccgtcttcacctacgcggaatgcgtcgtgtgtccagataaatttcaccggttgttccatcaaagcagccatacgtacggcaggtttcatgtagtcggagaatacgaagaatgtaccgcaagcagcgatcacaccaccgtggagagacataccgatacagatacaagccattgacaattcagatacacctgcctggaagaatgctccgctgaaatcacctttcttgaaagaatgagtctttttcaggaaaccgtcagtcttgtcagagttagaaaggtcggccgaagcaacgatcatgttttctacctgtgtagcaagtgcgcccaatacggttgcagatgcagcacgagtagcgctacctgctttctgttcgatagcagcccagtccactttcggagctttgcccgagaagaagagttccagttttgctgccagttccgggtttgctttcgcccatgcagctttctttgcatacttttcagcaacgatcttcttcagttcttctgctctttttgcatacagttcggctacttccgggaatataacgaacgggttagtaggatcaccacccagattcttgattgtatttacgtatgcgtcgccgccgagaggagcaccgtgtgtagcgcagttagcttcatagctgctgccgtctgccttgcgtgcacctttacccattacggttttaccgataatcagcgtcgggcgttctttttcagcctgtgcttctttgattgccgcacggatttcgtcaggatcattaccgttgatactaagtacgttccatccccatgcttcatatttcatggcagtatcttcaacggttacgtctttcgtttctgtagaaagctgaatatcgttggagtcatagaacataatcaggttgtccaatcccagtgcaccggcaatacgtccggaaccttgagagatttcttcctgaataccaccgtcagagatgtaagcgtaaatggtctgattcatcacctcattgaaacgggctttcaagaatttggcagcgatagcagcacctactgcaaaagtgtgtccttgtcccagcggaccggaagtattttcgatgccacgcatgatatccacttcagggtgtcccggagtagggcttccccattgacggaattctttcagctcgtccagcgtgaattttcctgtcaatgccaacgtagaataaagcatcggagacatgtggcccgggtcgaggaagaagcggtcacgtccttcccaacggggattttcaggatcgtatactagaaactcagagaagagtacatttacaaaatcagcaccacccatggcgccacccgggtgaccggaattggctttctcaaccattgaagcagcaagaatacggatgttatccgctgcacgattcataagtttgttatcgttcatatcattaaaatttaattgatttctgtcagattgttcgcaaagataactctttatgtggatttaacaatccaaaagagctatcttttttatcgacaattttacggtcttcttgtttgtgatacaataagtaattgctctaaaattactgtaactctaaagtaacaatggacttagcaggaagttttaccttcattgtacctttattgatttttacctctttgaaaggtgccggttttacaatattaggtttttcaaaagaattgtaatcggtcagtttggaagcggtcagaatctctccggtagctttcttggctttcgtatcacccagattgatggtgatttcctgcgcttcatcagcatctacattggaaagagaaatatggatcaccccatctttatttttggaagctgtggcgctcaccatcggtacagtgcggttatcacgtacacttatcttttcgcaagtcaggtcgataggaagataagtggcatcctggtgtactttatacatcttgaagacataataagtaggcgtcaacaccatttctttgtctttcgtcagaatcatcgattgaagtacattgacaatctgtgcgatatttgccatcttcaggcggtctgtatatttgtggaatacatcaagacttaaagaagccacgaaagcatcacgcaacgtgttttgctgatacagatgtcctttgatggttccgggttcctcatcccaccaggttccccattcgtccagtaagagagcgattttcttgtccttgtcatatttgtccatgatggtacaatgtttcttgagtacatcttccacttccagacatttgcccatcgtccagtaataatcatccttgttgaattgagtggctgatcctttgctgccactccatccggttacggtataatagtgcagagaaagaccgtccatccggtgtcctacacgattcatcaatacatctgtccatttgtaatcatagtcacttgcgccactggcaatcttgaacagacggttgccgtcataattgcggcaataagtagaataacgacggtataagtctgcgtaatattccggacgcatgctgccaccgcacccccagctttcatttcctacgccgagatatttcaatttccatgctttgtcgcgaccattcttacggcgaaggttagccataggcgagtctccgtcagaagtcatatattccacccatttagcaagctcttccactgtgccgctacctacatttccactcacgtatggttcgcaacccagcatctcgcaaagattcaaaaactcgtgggttccgaaactattatcttcaatggttccgccccagttgttgttcaccatcttcggacggttctctttcggaccaatgccgtccatccagtggtattcatcggcaaagcatccgcccggccagcgaaggacgggaacggacaagtctttcagtgcattgaatacatctgtgcggtatcccttgatattgggaatatccgagttttcgcctacccaaagaccgccgtagatacatgaacccaggtgttcggcaaactggccgtaaatttccttcggtatgatttctttgccttggtcggcatgtacggttatggtagcactcttttgtgcagaaagagatacggatgctgctagaaaagccgtgctgactaatagttttgctttcataaatggtatttgtttaatgattatttgagtaaacgcacttcataaacggcagaggtccattccgtcccgtcagggataaaacgtatcggacaactacccgtattcaatttttgaggcagaacgtatgaaagggttatgaaaccgtctttatccgcttcactgatagtcggatgaacagccaacttttcgttattcagaagaatagccactttattgcggtcatctttccgtaccgtaatcaggaggcggcttgcttcttctttcactttcaactgatagccgaaccaacctttggcacgtcggaaatgccggtctttattcgtccctgtttctgcctgctcatactggatgccatggtcagactccggctgctgttcgccggggaagatcaggtcaatggtttgattagctaattccgttgcttttcgttcagccgttgccatctcttcctgaatcgctttaaactgctcttcgcttgcctgccggaaataaacggcataacgggaattgtgcaggcggaagaacgggacgagtttcaatgctttgccttgtgcaggatacacctctccgttatagctgaaagtaatccggctattctgttctttctgaagagatttgcagattgaatcaggatttcctatcaatatcgggatttcttgcaaaggaatttgtttgccatgagcgatatgtccgccacggctgtcatcggcatataaaccatcaagatgttcagtgcctgtggaagctgcaagaacgatcggaccatataagaaagcataataatctttcttgtcgggaatttgttccacgctgactttcataggcaagtggaaagtaatgacatcccctttttcccatttgcgggagagaggaagatactggttaccttttgccataacgaacatttttctttttccattgatgctgacgctatatcctttggattggttcgcccattccggaatacgtatcattaaagtacgttttttcttaggcgcttcatctattcgcaaagttaccttgccgtcatcggggaaacgggtttcctgtgtcaaaataatgccttgctctttccaggtcagttgtgaaggaatgaagagattgacataaagagtgtctttccgatacgcatagataaattcgccgtatttggtatgattctccaagcctgaacctacacagcaccacatggatgtttccggttgtgagtacacacgatagtgtcccggacgcataggagtgaagtagacaaatccacctttatccggctcttgtgacgctaagatatgattgtaaagcgcacgttcgtaatagtttacgtagttgggatcaggttcgtttgtttgattcggattgtgagaattctgataaagcattttggtaagacggagcatgttgtaagtattacaggtctccggtccttgaacgtcgttcagcatggacgtgaagttatccgatggatggaaatgttcgcggacgctatttcctccgatgcagacagaacggtgattgactaccgtgttccagaaaaaacgggcggcatgatcccattctgcagcatgattccaagtcttgtcgtcttgtgaaagttcggctattcgcttgtagccgatcactttcggaatctgtgtgttggcgtgcatccccgtcaatttgtcttcctctttgataagcgggtcgaggataaggttgtgagagaaacggcgtgccagttccagatacttcttgtcgcctgtgatttcggctacgtcagcgaacgtttcgtttaatccgccatgttcgctgcgaagcatatcctgcatttgttcgtcactcaagccggaagtgatatcgatcatccagtctgtaaaagcgataagcatttggcgtgcaaggtcgcttcctgcatagatatatgcatcccgcaatccggcgtaagtcttatgtatattgtatagaggtacccatttgccgttaaggtcgaaacctccagcacggatcttccctgcttttatatctttccaaagttgaaggcttcccggagttcctccgatgaatcctgtgccgacagtttgttgtgcccggttcaactcattcagcatgtagttgaggcgattatagactgcggtatctccggtggcggcatacatcatggaaagtgcggataaataatgtccgccgatatgtccgtccaatccggtattttcccaattggtgtagctgggggctttaggctgtaaccctgcttcgcggagaaaaggagcgagcagacgatcagggtctaatgcaagtatgtaatgtaaatcagtctgttgagcttgcagaaacggactatctaatagtttcacattctgtaaagggaagtaagacacttgtggggcgttttgagctttgcccagtgaagtggacaggacaagtgcaagtatgaacgaggtggttttcatgataatagtctccccatctctctctccaaaagaggagaggggtggagataattaatgttaatacttagttagaattgactcttgataaacagcgatttatcggcaatctttgatgaataacaatggattgccgactgtcaattatttaaatttgactgctgcctcttcgataggcaatcctgccttatagttttcgatgtatgtattgaagccggctacatcttcgggtgtaggtgatacctcgatacccgcgtcaccgacaaatacgctttcatccagaaaatcggcaagagattgtttcttttcattgttcacgaggtaagaacctaacagggcaataccccaggcaccaccttcgccggctgtttccatcacagaaataggcgagttgatagctgcagcaagtattctttgacctactcctttggttctgaataatcctccgtgaccagtaattctgtccactttgattttttcttcgttgaacaggatatcgttaccaatcttgagcactcctactgaagcatacaagtgggtacgcataaagtttgccaggttgaacttgtcatttgccgagcgtacaaacaacggtcttccatcagcaaatcctgttacgggctcgcctgaaatataattgtatgaaagcaaacctccgcaatcggtatcaccggtgagcgcaatattgtaaagtttgctatagatttcatccatatctacaggtatgcccagaagttcctgatattccttgaacaggttgacccatgcgttgagatcagaagtacagttgttgcaatgcaccatagctaccagacttccgtcaggagtggtcaccatgtcaatcatttcgtatggcttcgacaaatctttctccaatacaatcatagagaatgaagaagtacctgccgatacatttcctgtgcgttgtttaacagcattggttgccaccattccggtacctgcgtctccttccggcggacaaaccggtattcctgctttcaaatgacccgatgcatcgagctttttacttccttccggagtgaggacacctgcattttcacctgccgataatactttaggcagaatatcttccagtttccagctatattctttcggagcaatcagtttatcgaacttagtcaccatttcagccgaatagttgtgggttgtcggatcgatagggagcatacccgatgcgtcaccgatacccaataccttttcgccagttatctgccaatgcacataacctgccagagtagtcaggaaatcaatgtcattcacatgcgcttcattgtccaggatagcctggtacaaatgagaaatgctccatcgcagcggaatgttgtagacaaacagttctgataaggctgctgctgcccgacctgtattcgtatttctccaggtgcggaaaggcacgaggatttcttcttttttgttgaacggcatataaccatgcatcatggcgctgacgccgatagcagccagcgtctcaatctctatgccatataagttctttacgttagcgcgaagatcagcatagcaatcttgcagtcccgaccagatagcttcaatattataagtccaaagtccgtcaactagctggttttcccaagtgtggctgccttgagcaataggcttgttttcctggtcaatcaaaactgctttaattcgtgttgaccccagttcaataccaagaatggctttgcctgcttcgatggttgattttgcatctaatttcatgttgaaatcaatattttaaggtttagcaaagcgctttattcaacatgtaataaacttcgttcatgcgcagttctttcttgaagcagctgatcgtagtatccttgttgatatgtaccatttcgatacctgcgatttcagcataatcttcccaatattctgctgtcaggtcgtaagagaagcaagagtggtgagttccaccagccaagatccatgcacctgcacctacttcgaggttaggcatcggaatccagagagcagaagcaaccggcaacttgggcagcggtttcggttcgatacattccacatcgttcacaatcagacggaaacggttacccatatctactattgtagccgtgcatcctgcaccagtctttgaagtaaataccaatcttgctgtctggcttttgcggatacctataccgaggaagtgtacttccaggcgaggtttgttggctgcgataagcgggcaaatttccaacatgtgtgactgtaggatagagctgttggcaccgtcgaagttcagtgtatagtcttccaggaatgaacaacctctgggaagtccctgattcatcacccataccgtacggtaaagagcagccgatttccagtcaccttcagcaccgaatccgtaaccttccgccatcagacgttgtgaagcaagacccgggatctgatcgaaaccattgtattcaatgtcgcccaaatcgtcaaagttggtcgtaaatcctttagcacctttagctttcaggatagcacgcatggcaagttctgctttagcggcattccaaactttctgataagcttcagtcgatttgtcttccaaagaagcatcgtggtcgtattctttgaagtaggtagctaccaatgcatctacatcttcattcttgatttctttatggtattccatcaattcgcttaccggacaataatctacatggtaacccatacgttgttcagcttccactttatcaccgtcggttacagctacattgttcatctggtcgccgaaacggataatcagcatatcctgtgagtctgcccaaccggcacaaacacgcatccagacagcgatcttgtgcaaagtgtcttcctctttccagtaacctaccactactttacgacggatgcgcatacgggtacagatatgtccgaattcgcggtcaccgtgagctgactggttcaggttcatgaagtccatgtccattgtatcccaaggaatttccttgttgaactgtgtgtgcaggtgcaacaatggtttcttcaactgttgcagaccatgaatccacatcttagcaggagagaaagtatgcatccaagtgataacgccgacacatttttcatcgttattggcagctttgaatacagtttccacttctttagaagagttggcagtacctttgtataccaccttaacaggaagtttaccggattcattcagtccgtttaccatttcattagagtgtgcgtctactgcgattactgcgtcacctccgtacagaagctgtgctcctgttacgaaccatacttcatattgatcaaatacgttattcataatgttattgctttaatttttaatatctgtttttttaattgttactgtccataataagcattcggaccatgcttgcggctgaaatgtttttctaccagcagcgggttcattgttaaattcgggtttaccgcataagcgatacttgccattttggctacctgttccattaccacggcgttgtgtacagcatcatgcgcatcttttccccaagagaaaggaccgtgattttttactaacactcccggtgtatgtacaggattcaatccttcaaaacgtttcactatcacattaccggtttccagctcgtaagcgcctttcacttccgcttccgtcatatctgccgtgcagggaatagcgtcatggaaataatccgcgtgagtcgttccgatgttcggaatgtcgcatcccgcctgtgcccaggcagtcgcataagtagagtgagtgtgtactactccgccaatctccggaaatgctttgtaaagtactacgtgagtaggagtatccgaggatggcttcagtcgtccttcaacgaccttgccatccaaatccactactaccatatcttcggccttcatatcatcataacttacaccactgggtttgattactaccaatccgctttcacggtcgatagcagagacattgccccaggtaaagatgactaatccatgctttaccaattcaagattggcatgaaatactttttcttttagttcttccagcataatgattatattttaaatttcgggtctttgcggtaagccttgccgttgaacttatacaaggcagcgccccgtttggaacccagtttatcaattttatcagtcttttctatataatccatttcagccactcttttacggaagtttcgtttatccattgtttcaccgtaaatggcctcatataaactttgtaattgggataatgtaaagagtttcggaagcagattgaatccgataggttctacggatgctttctgtttcatcagttcccgtgctttttctaccatttcaggatggtcgaagataagcgggggaagttcgttcatattcacccagtaagcattgtgcttctgaaccagtttccggtcatactcattgatgttaatcaatgcatagtaagccacggagataacccgttcacccggatcgcggtcgattgctccgaaagttcctacctgttccatgtagacgttttccaatccggtaagctcatgcaatacacgtttggcggcatcatccacactttcattgttttgcacaaatcctcccatcagtgaccattcacccattgccggctcgaagtttctctttaacaatagcaagctgatttccccttcgttgaaaccaaagatgatacagtcgatgccgacataaaaggtgggattcgagctataataagcctccccccggttctttccaaaagagagggagtttgagcttatcattgactcttgtgaattatctttatccatttagattgtgattttagttataataaaccagtctttccgttggcaagactatttttagattccttcaacctttcccaaagagaaggttgaaggaagggcttattttttaccagaaataccagtagaaagcacctgtaatagccagaataattacagtatgaataatatcccagtgattccagcttgcacgtgtagctgctttttgttctttggtagctgtaccgaatactaatccctgaatcttttctgcagtcggagctttggttgccaggctgactacgattactacaataatgcagaacaagaacatccatccacagaagaataaccagttcatatcatagaacaaatatttgaatgtagaatctgctacttcacctgcattgctataatatacttttgcaccgaggcgagttaaaccgattaccataccagcaatcaatccccacataccaccctgggcggaagtacgtttccaacagatacccagtaagaaagccgcagcgataccaggagctagtacggattgaacgtcctgcaaataagtataaagtacatcgcctacactacgcatgataggaatccagagaatacctaaaataacgattacaaccgttgcaacctgaccgatacctaccagtttcttctccggagtttcaggtctgaaacgtttgtagaagtcgatagtaaacaacatggctgatgagttaaacagagatgcaagagaactcatcaaagcagcaagaataccacatactaccaaacctttcacaccggcaggcaataatttggctactaatgtcgggaaagcggcatcagcatttgctgttccgttagccagcatcggcaagaaaccttcgctaccggcaccgatatatttttgatgtaatgcaaatgcgatcataccaggaatcaagaaaaggaatacaggtaacaatttcagataagcaccgaaaatggtaccacgacgagcttccatttcatttttacctgaaagtacacgttgaacgatgaactggtcggtacaccagtaccagaaaccgataatagccgaaccgatcaaagcgcccaaccaagggaagtttgcatcatcattgctacgaatcaggttagtcatcgtatcaccataatcattgacggtaacagccccgcagactctcatcatttcatcccatccacctaattctttgaagccgagtaccagaattattaatgatcctagcagtaggataggggtttgaagaacagaagtgtaaagaactgatttcataccaccgaagatcgtataaagtgcagttaacactaccagaccgatagctgcaatccagaagaaatcaattccccaaagctctttgataccgaatacttgttggaatacaagaccaccggcatatacagtcacagctactttggttaacacataactcaccaaagagatgaccgacaggatggtacgtgattgaggattatagcggcgttccagaaattccggcattgtatataccatgcttcgtgtgtagaagggtacaaacacccatcccagaatcaagatcatccatccctgaatttcccagtgtgccatagccataccactggatgcaccggctcctgccagtccgatcaagtgttccgaaccgatgttggatgcgaaaatagaggcaccgatcgcaagccatgttgcgtcgcgtccgcccaagaaataatctgccgagtcattttgtttttgtctgactacccaaacaataataccgatcagagccagaaaaaagactccgattactagccaatctaatgcttccacaataaatatgatttatgagttaatattatttctctacagagaatttgaaaatacattcactattataagtttgtcccggttccaatacaacagaaggccagtctgccttgttaggactgtcaggataatgttgtgtctccagacacacagaagcacgttggttgtaaacgatacctttctttccggttacggttccgtcgaggaagtttcctgtgtaaacctgtacacccggttcgttggtatatacttccagagtaataccgctttcaggtgaggtgagttttgcggcaacttgcgaaagatctccctttgtgttgagtatccagttgtggtcatatccttttccgttcttcagttgaacgaaatcgtagttgtcgatctctttgcctacagctttcggagtggtgaagtccattggagtgtctttcaccggagcgatttcgcctgtagtcataaaggtgctgtctaccggggtatagtagtctgcgttcacatacaatatattgtcggttgaagcttttgacggatcgccggccaggttgaagtaagagtggttggtcatattgatgatcgtctttttatcggtagttgcgctatatttgatgtcgatagcgttgtcttcagtcagtttgtaagtcactttagctgttacattacccgggaagttttcgtctccgtccggtgagacaagtgtcagttccagcgttgtcggatcaatcagattagcttcataaactttgtattgccaacctttcggacctccgtgcaggcagtggccgaaattgttttgcggcagttggatcgtgtcaccgtccaatgcgaaacgtccttggttgatacggtttgcatagcgtccgatagaagcgccgaagtcgctgggtacattaatatagtcagcaatgctgtcaaaacctaaaactacatcttgcatcttaccgttcttgtcgggtaccatgacagacacgatacgtcctccgaagttagtgatgcatacttccatgcctgccttgttctttaaggtgtaaagagctgttttggcattgttcacttctgtttgaaattttaccggatcaaggccggacaaggtcagctcggaagccggcttgttattgcacgcaaccagcatcagcgcggcaaatcctgcaagtagaaaatgttttttcatggttttatttttaatgtaaatgagatatttatcttattttgggtgtaaaagtaacacttttgtttggtgtatcaaatacactcttgtatgttatgcagcataaacggtatattttatgatttcccatacaccttattatatatataaatgtacgctttccatccgtttatttttcatataatagagcgggtgaataggtgttttttgatctggtttcgtattataaatatcagatacgaatggaaaattgtgcaaatgaatggaatttgatcctttttgaccgatatacacctgttaatgataaaatcgggtacggggaaaatagagaatctgattatctttgcattttaactatatataatttttattgagaaccatgagaagatacgcaaatttattggcagtattagccttgtctactaaccttgcgcttcatgcgcaaactaatgagttggtgatacagacgaagaagctgggtgcagaaatccaacctactatgtacggactcttttttgaggacatcaactatgctgccgacggcggactttatgccgaactggtgaagaatcgttcctttgaatttccacaacacctgatgggatggaaaacgtacggaaaagtatccttaatgaatgatggcccttttgaacgcaatccgcattacgtgcgcctttctaaccccggacatgcacataagcataccggattggataacgaaggtttcttcggtatcggtgtcaagaaaggggaggaatatcgcttttccgtttgggcgcgtttgccgcaaggaagcacgaaagaaacattgagaatcgaacttgtagatacccaatcaatgggcgaacgtcaggcgcttgtcgcagggaatcttacgattgattctaaggactggaaaaaataccagataatattgaagcccggcagtactcatccgaaatccgtacttcgtatttttcttacttccaaaggaacagtagatttggagcacgtctctcttttcccggttgatacttggaagggacacgaaaatggtcttcgtaaagatttggcacaagcattggcggatattcatcctggagtcttccgctttcccggtggttgcattgtagaaggtaccgacctggagactcgttacgactggaaaaaatcagttggcccggtagagaaccgtcccttaaatgaaaatcgttggcagtatacttttactcaccgattcttccctgattattatcaaagctatggattgggattctacgaatatttcctgctgtctgaagaaatgggtgcggcacctctgccgattctgaattgcggactttcctgccaatatcagaataatgatccgaaagctcacgtagccgtttgtgatttggataactatattcaggatgcactcgacctgattgagtttgctaatggagacgtgaataccaaatggggaaaggtacgtgccgatatgggacatcctgctccgtttaacctgaagtttatcggtatcggtaacgaacaatggggaaaagaatatcccgaacgtctcgaaccgtttatcaaagccattcgtaaagctcacccggaaattaaaatagtaggtagctccggtccgaattccgaaggaaaagagtttgattatctgtggcctgaaatgaaacgtctgaaagccgatttggtggacgagcatttctatcgtcccgaaagttggttcctggcacaaggtgcccgctatgacaactacgatcgtaaaggtccgaaagtctttgccggcgaatatgcctgccatggaaaaggaaagaaatggaaccattaccatgctgctttgctcgaagctgctttcatgaccggattggaacgtaatgctgacatcgtccacatggctacctatgctccgcttttcgctcatgtggaaggatggcaatggcgtcctgatatgatttggttcgataacctgaactctgtgcgtaccactagctattatgtacaacaactgtatgcgcagaataaaggaacaaatgtgcttccccttaccatgaataagaaaaatgtaacgggagccgaagggcagaacggactctttgccagtgctgtttacgataaggataagaatgaactgattgtaaaggttgccaatacttccgccacaatacagccaattaccttgaattttgaaggattgaagaaacaagatgtattgtttaatggccgttgtatcaaacttcgttcgcttgatttggataaggataatacacttgaacaaccttttgccatcgttccgcaggaaactccggtatctattgaaggcaacgtgtttactaccgaactggaacccactacgttcgcggtatataaattcacgaagaaataagtagaactaattagatgttattagatcaataggttttagatttttgttaattgtaaaaagtaagaggttgtgtcaaaacgttggcacaacctcttttatattttacagttctgctatattttcttttggctatgctgctttttcctcatgcatttggcaacaagttgctatattccaattatatcgggttataaatagtcccataaacatatatttggcaactgtaatgagcccctttccttcttttatcagtttagcacacatttttttgatattaaaggctatagcaaagaaagcaaagtccattgtaaccttgtcttctcccacatgccggaatcttctgtatgccatgttgtatttcatttgtccaaacacagcctctggttctatacacctcctgcctctatgcttgataccttcttctgagagcaacctttcccgtgcctgccgtttgtattgatttaatcggtggttgacttctataatacggttcccccgagctttaaaacaactgccacgcaaagggcaaccttcgcatctttttgctttataccgggcactttcggtgatgtatccgctcgctgtcttgtcacgtttggttcctatacggttcatgtgctgtcccataggacaaacgtaataatcctcttgggcattgtaatggagactttcggcatggaacgggttgggagtataacgaggacgctgttctttatggaagtaattgtacttgatgaaggcttctatcccattctcctgcatgaaccggtaattttcttccgaaccgtaaccggagtctgccacacagatattcggtaaacggttatagcggtattggaaagagtggaaaaaaggtatgagggtcagtgtatcggtagggttgggaaacagacggaagtctgtgatgaattggttttcagtacctatttgcagattatatccgggtttggtctgcccgttcttcatggcatcttctttcatgcgcatgaatgtggcaccaggatcggtcttggaataggagttgcgttctccaagggtatcaaggtgattgtcgtattctatcagcttgtcacgatacccttcaagttccatgacctgcttcttctttttgcgcagggctttcttttcttccttatcctttgttgcaggctggtgttccagggcttctttaagttcatccactatgtcagagagcctgcagggagtaaactccacggatgtgtcttttatagagttctcctgtgcaatggcttcatccacctgctccaagagaatacggattttatccattagtatcgtacggttccgttcgactgtcttgcgccagacaaaagtatatttgttggctttggattcaatcttggtgccgtcgatatactccacatcaaggctgatgaaacctttatcggcaaggacaagaaccaactgggtaaatacattatttatttcctcctttacacggttgcgaaaacggttgatcgtgataaaatccggatgctcattaccggcaagccaaatataatgaatgtcacgaaggaggtacttctctattttacggcaagaatagatattattcatgtaggcgtagattatcaccttaagcatcattttaggatgataaggacaacggcccgtttccttataaagcttcttgaaactctcaagattgagattgtcaataacagcattcacgatgcggaccgggtcggtcgcagctatgttttcatcaattctttgtggaaaaagaacggtttggttgggaatgtaaggacgaaaatgtaactttgccataacgaaaaactttatacctaaagatacgaaaactttgggtaataacaaagcccgggcttgagaaagtctgggctttgcgcataaaaaaaggctgtgtcagcgttttgacacaacctcttcttgatgtatagttatgttatgatcataataacttttcaggatgagttagttcttctactagctcatatacagtagtacaaggtttgtgagctgcataatctgttcccgaaaatgattctcttaagcgttgagcatgtttgatagctaatgattcatctcctatacgttgtaatatgtcgaaagtttccggtgatttctttttatatcggtagtttgaatcatttgttctattttggatttccctttctattttctcaatgtattgagaacgggatatgccagtatccaaatattgaaaatgtagataataccaaagttcgaatgactcattagaccatgcgcaaagaatatgattcttttttgcaagctgtatggcgttattgaaatcattaaagtcatctttatcaaaaacagcccataccctgtcaaactctttatttgatttatcacgaatagctatggtttctttgataagactgactgtaccttgtcccttaccttcaattgtaacttcacggatatccgaataacggtcttttattaaagccttgaaatagttaggttcagttctttcaccttcacatacgataaggaaactaacagatacattgcgtattgctacttttcttcttttatccagttttgcctgtctttgttctctttttatttcctcaaaccgatgtttcggcagcagtctactcattgtgtattaatctttaatatatggaattgcgccataacgtccgttgatataatctttttcaaaactacggtctttccgaattttgtttccttccggttctctgaattctgctaatgaatagaggtcggtagcttccgaatgatctttttccgtaaaccaaatctgatccctacggaatgtctttacattcagtaaattagtgtcgtgggtagcaaatattaattgagctcccttgggatttgttttggggttattaaaaagtttaataatatgttgagttagcagtgggtgaagcttcgaatcgagttcgtctacaaccagtagatcccctaacatcaattgactaataactaaggcggccaaatcgaatagtttgttagtacccgatgactcatgttctttcatggagaagcgggtttctccaatgacttctccctgttcattatacaaattatgtatggtgtatgctttgatttctttagccaacttttcatcttcaggaagttcaaatctgttaaaccctacattcatagatttcaagaagtcttgaatctcttgttgaaagctaagatccggattttcaatattacacatatcatttgtaaatccagaccaagattcatggttaatgcctgatattatccaaaaattatcaattttgtaaatgattttttttgcaatttcaccattaaaagaatcaattgtcgataaaaatagtccattgtcacgtaccttttcttctaaacctttaccttcattataatcgtcagctattccgattccttcttccgtacgaacaaataagcatttttcctttttcgcttttccctcttttgtatatagccattcttcataaactttttgattatttgctgtgaaaccatatctatatgctacgttatctagtaatagttcaatttcaaaaaatgatggttctttggctgtttcttgatttaataagaaaggggaaatttttaatttgtctgtagagtttaatttagaagaagaattgataatctttttaaatctaccaattgccttcaataaattactttttccacttgagttagctccataaataacagctgatggaagtagtctatatccttctttctctataacagattcattcaattccttaatagcggtagcttccatgctcaaaacctttttgtctttgaacgaacgatagttgcctactgtaaaattgattatcatattgtttttatattaagttgtctattctatagaacatgacaaagatacgaatagttttagataattctcttaaaatgagagaaattctcattttaagagagtagagttgaggttgtgtgttattatgccgtgtaaaaagtaagggcggctcccatcacggaagccgcccttcttatttatttaatttcgaataaattcttattccagtctacgagaaccgtcgccgattactacgtcatacactttcgggcttctgccgaatttagctttgaaagcagcttttgttttttcaacgaagttgtcatacaactcatccttaacaaggttgatcgtacaaccaccgaagccaccacccattacgcgtgaaccggttacaccgtattctttagcgcagtcattcaggaagtcgagttcttcgcagcttacttcgtacagcttgctcatgccgtgatgagtttcgtacatcttctggccaacagtttcgtaatcatctttctccaatgcctcgcaaacatcgagtacacgttggatttcttcgattacatattctgcacgcatatagtcttcagcgctgatatcagctttcgcttcttctagcatagccattgtacagtcgcgcaggaattctacgtgcggatgttttttctggatagcggcaacagcagcttcacagctttggcgacgcttgttataagcagaagaagccaattcgtgtttcacaactgaatccatcagaaccagacgataaccttccggatggaatgggaaatactgatactccagtgaacggcaatccagacggatcaagctaccagctttaccgaatacggaagcaaactggtccataataccgcagttcacaccacagtaattatgttctgtagcctggccaactttagccaattcaaatttatctattttgttttcaccgaacagttcgttcaatgcgaaagcatacgtactttccaaagcagcagaagaagacatacctgcacccagaggtacatcacctgcgaaagcagtattgaatcccttcacatcaacgccacgtttaatcatttcacggcatacaccgaaaatatatcttgcccagctggcgcgtggagcatcttcttcattcaaaccaaattctacataatccttcaagtcgatagagtaagcctttactttgtcagtaccgttaggtttgatttcagcaatcatccctttgtctaccgctcccggaaaaacgaatccaccgttgtagtcagtgtgttcaccgatcaggttgatacggcccggagaagcatataaaaatccagtagttccgtcaaagtgtttaatgaatcgacttcttacgtattctgtatccatgatatttatattttaaaggtgaataaattgaattctattctatgtgattattccacaggaatatccttatttacattcttgcaacctaccaaaccgtagaacaacaggtaagccagagcagcgataatcaaccagtagctagccatataacctacagagtcagagatgctttgttggatcaacggcaatacaccaccaccaacaaccatcatcataaagattccggaagcctgtgctgtatattttcctaagccttctactgcaaggttgaagataccaccccacattacagaagtacaaagaccgcaaagtacaaggaacaaggcacttataggaacctgtgccatcataaagccttcgcctacagtgtaacccggcattgaaaccgttacatctttcggagtgaagatagcgatcaatacgaaaatgatagcagtagcagaaacagcgatcaactgtgcacggctggaaaccttaccactgatagcactacttgtagtacgtcccacaagcatcagcaaccaatagatagcagcgatagcaccaccgatagcagcaccgttcatcatgataccggcacctttatcgcttgaatcggcaagatagaagttcagtgtacccgggataccaatttcaatacctacataaataaagataccgattacacccagtaaagtgtgacggaagctccatggactgtgagagaatttttctttcttcactccacctttctgaaggtgtggttcaggaatagcaacaaatgagataacgataaatgcagcaacgaatacacccatagcaacgaagagcagaggagcaacgtcagacatagcagtacttgaagtaacagtaccgatcaaagcacctacgaaaagcggagtcaatgtaccagacaaagaattaagagctccaccagtttgaatcaactggttacctttgttaccaccgccaccgagaaggttcaacatcgggtttaccactgtgttaagcatacaaacgcagaaaccgcagataaatgcaccaagcagatagattacaaagtttaatttgataacatactcaccgaatgcgaatacttcagcacctgctccgaataagctggaaagatactgtgtgaacaaaccgaggaaacctactgccattgcaatcaaagcagtcttcttgtaaccgatcttaacgagcatgttaccggcaggaattcccataaacaggtaagccaggaagttcatcatatttcccatcatacctaaagtgttcgaacccgcatattcatttctccagattgttccgaatggagcagcgaggtttgttacgaaagagatcatcgcaaagatgaagaacatcgtgataattgcgacgagattaccgttctttttttcttgtgtcatggttcaaaaaaaatgttagtttataaaattaggttagttatttttcaaatcttattcttctaccgtaaatttgtagacagtgatctgttggtattcatcacccggcagcaaggtagccgatgggaaatgaggtttgttcggagtatccggaaaacactgtgcttcaaagcagatagcgcttctggcagggaatgtagctccgtgtgcaccttcaaatccgttgagccagttgcccgtatagagttgtacacccgcttcggtggtatatacttccatgatacgtccgctttccgggtccttgcaagtggcagccaggtcgagcgaaccgctttccatcttgttcagtacataacagtggtcatatcctgcaccgaaaatcagttgctggaatttgtcgtcgatacgttcgcctacagtgtgtggagcacggaaatccatcggagtaccctctactttggcaatttcaccggtagggatagaaacttcgtcgataggcgtatagaaatcagcgttgatcgtaacgatgtggttgttaacggtaggagtagggttggaaataccggcgaggttgaagaaaccgtggttagtcaagttaacgactgtagctttgtcggtggtagcgcggtattcgatagtcagtgcatttacttcattttccaggcggtaagtcatttccacttccagattgccggggaatccctcttcgccgtcagcagaaacatagttgaattgcactgtgctctcatcaatctggacagcatcccaaacacgggcgtggaaaccggtaggtccaccatgcagagagttaggtccgttgttaatcgtgagttcatgttcttcgccgaacaaggtgaattttccttttgcgatacggttgccgtagcgtccgatagtagtgcttaggaaaggttccgggctgttgatgacgtggtcgatgctgtcgtgtccgaggattacattagcatacttaccgtttttgtccggtaccatgatagaaagaatggcgcatccgtaattggttacagctacttccattccctttgtgtttttgaggataaataaatcagttttcttatcatttatatccttttggaaatctttccggctgagccctgatagattcccttctgttgggaatgtgttattcatgtctggtattattaaaaatttcctgcaaataaagggaaattctttcttactcacaaattattccgactaaatatgacaggtgctttaggaaagtttagctttattacttcatcttctttggatgcaaggacaaaagatgatttcttaaatgaattttcatcctccttttcttaaaaactgaactattttttgtatgtttgttcccggattgtaacaatccgagcgaatttaatctaagtttataacaagaaaaacaaaaatgtatccattaaaattcgaacctattctgaagcagacgctttgggggggcgacaaaattattccgttcaagcatttgaattcagacttgaaaggagtaggagaaagctgggagatttccggtgttgagaacaatgaatccgtagtggctaatggcccggataaaggtttaaccttggccgatatggtaagaaagtatcgtgaggaactggttggtgaagcgaattatgcccgtttcggcaataaattcccactgctcattaagttcatcgacgccaaacaggatttgtcaatccaggtacacccaacagatgagttggcgaagaaacgccacaattcgatgggaaaaaccgagatgtggtatgtggtagatgccgacaaaggagctaaattgcgttcaggattctctgaacagattaccccgaaagaatataaagaacgcgtgttgaacaatacgattaccgacgtattgcaggaatatgaaattcatccgggtgatgtattcttccttcctgccggacgtgtgcacagcatcggggcaggttctttcatcgccgagattcagcaaacttctgatataacttatcgtatctacgatttcaaccgtaaagatgcgaatggtaaaacccgcgaacttcacaccgatttagcccgtgaagccatcaactacgaagtattggatgactatcgtactaaatacgaaccgttgaaggacgaaccggtagaactggttgcctgcacttacttcacgacttctctgtatgacatgactgaagaaatcagttgtgactattccgaactcgattcattcgtgatctttatctgtatggaaggatcatgtacaatgagagacaatgaaggtaatgaactgactgttagtgcaggagaatctatcctgttgcctgctaccacgcaagatgtcactatcactcccgaaggaggaagtgtgaaattgctggaaacatacgtataagataatagcgtacaaaatgaaggtcatccgactttgtttcatcctcatgatgggcaaaggcggatgactttttttattactaatagaataaaaacggcaaaaaactctttaactatatttattaaaaagtttatctggaacacacaaaaagattcgttcttttgccgctagccaaatggcataatatataaaataactagtgatgtaatgaggaacaaaaatggatttagccgatgtgcagagttctacatcggccgtttgcgaaaggagggacgctattctacggcgcatgtctacaagaatgctctcttctctttcagcaagttttgcggcacgctcaatgtgtcgttcagacaagtcacccgggaaagtttacgacgctacgggcagtatctttatgagtgtggcttgaaacccaacacgatctctacgtatatgcgtatgcttcgtagtatttataaccggggagtagaagcgggcattgcgccttatgtgccgcgactgtttcatgatgtttataccggtgtcgatgttcgccagaagaaggccctgcctgctgtcgaattgcataagcttctgtatgaggaccccaaatcggagcgtttgcgtcgtacacaggctattgctgctctgatgttccagttttgtggaatgtcgttcgctgatctggctcacctggagaaatcggctttggaacagaatgtgttgcgatacaaccgtatcaaaactaaaaccccgatgagtgtggaagtacttgatacagccagtgaaatgattaaccagcttcgcaatagggaagatgcacaacccgattgtccggattatctgtttgacatccttagcggcgatcaaaaacgtctggatgaaagagggtaccgggaatatcagtccgctcttcgccaattcaataattgtttgaaggacttggcaagagccttgcatttgcaatctccagtcacttcctatacacttcgccattcttgggcaacgacagcgaagtatcggggagtacctattgaaatgattagtgaatcattgggccataaatctataaaaaccacacaaatctatttgaaaggctttggacttaaagaacgtacagaggtaaataaagggaatttatcttacattaaaaactgttgtgtaggcagggcaaaaagtgcaaagtattagtattcagaactaaagtatgtgtgttacttcttaggtaacggaacttaaatttgacgcaaagatagacaaaaacataaatagtaagcaaatattcttccactttttttcgttttatctgaaatataggaaaaaaactatccgaacatgaaataactttattttcatgttctaaactttttattgcctaatctctggatttttcctgttgagtattaggcagttcctttcttgtgccctattcctatatgtgatttccatttttatagagacgcgcgccttgtgtgtgtattgtccgttacctaagaagtaacggaataacatggggtaaaaaaacatgattttaacaaaaccaaaatcacttagtgctgggcctagcgatgggacaggggaaggcgtagcacactctaaacgctggtatgttgctctggttcgtatgcaccacgagaagaaggtagccgaacgtttagacaaaatggggatcgagaatttcgtccctgtccaacaagaaattcatcagtggagtgaccgtcgcaaaatagttgagtctgttcttcttccaatgatggtatttgtgcacgtaaatccgaaagaacgcaaagaagttctgggtttttctacagttagccgttatatggtgatgcgtggtgagagctctccggcggtaattcctgatgagcagatggctcgttttcgttttatgctcgactattccgaggaagctatttgtatgaacagctctcctttggcacgtggtgagaaagtccgtgttgtgaaaggacctctgaccgggctggttggtgaactggtcaatgtcgatggcaaaagcaagattgccgtccggctgaatatgctgggatgcgcttgcgttaatatgcctattggttatgtcgaggctgtctgcgagaaaaactaatcccgtcatcatttatccaccatttacatgaatacgaaattatccggtgcttttgcactgatattctttttcttctttctctcggcttgccagtcctataagaaagtaccttacttgcaggatgcggagattttgaaacaggcgaatacgcaagttgcgcctgttcaggacgcgaggctgataccgggtgatgaagtttccattcttgtttccacttccgatccggttgtttcgcagcctttcaatgcgcaaggcagtacgtttctattggacgatcagggaaatatcaattatccggttttaggtaaacttcctttgaacggtttaacaagtcgtgaagctgaaaacctgataacggatagactgaaatcttacgtgaaagaaagacctacggtagtagtccgtatgtccggctttaaagtttcagttttgggcgaagtggcctctcccggtgtttatccggtagtgaatgagcagatcaatgtgctcgaggcacttgccatggcaggagatttgactatttatggtgttcgtgataatgtaaaactaatccgcgaagacaggaatgggcataaacagtttgttacactcaatctgaacgacgcggatttgttattatctccttactatcagttgcaacagaatgacatcctgtatgtcactcctaataaaaccaaagcgcagagcgcagacatcggaacaagtacgacgatgtgggtttcgggattttccattctggtatctattgccagtttgctggtcaatatacttagataataccatctaattcccggtactcctccgtacaattaaaacacggacactccttcatcggattcaaatcatgatggcctacaatcaacgtcttaggaaatattttcctcaattcgcggagcagaccgagcaaagaagcccgttgtgccaatgtacgcgtgtctttgggacgtcccgccatatccagccctccttcgtaacaaatacctatcgaatgggtgttatggtcacggcagtgtgccccgaccttttccagaggacggccttggtagatttctccatcccgggtgatgtagaaatgatagccgatgtcacggaatctccggtgaaggatatgatcttgacggcaagcctccgccgaaagggactttccttccggcgtggcactgcaatgaatgataatcagagtgatggtacgcataaggctacatacagctctgtactccgatcagacctccgatagcggtggcaacggtgataatcactttgatgatgaagctccatacggagcggggagaagatgaattactcatgatgttacttttttaaagattaaaaataaagtatttaggattaagcagccggatcaggcgcttcaccgccaccatccggtttcggatcaggggtatcacccgaatcagaacctcctccggcagttgttggtttctgatattcggcctgctgtttcaactggctgtcgagtttcaggttggtggttgacaaattaccggtagcacgggctttcagacgcataccagtgatgtttttctccaatgagaaatcttccagcgtatcagctgccttactgcggatgcccacaccaaagatggcaaggtcgtcgattttcacacatttgccgtcgagcagcagttccttgatgcagtctaccatgtcggaaagcacacctttgatgacaccaccggaatacggtgaattgtgttttgacatgtgttcggcaagcttagccaaatcaaatgtttcgtcgcttaccgcacgggcgaaccacttgcctgcattcaggcctttttgctgttggttttgataaattttgtaacgaatcataaaacaataaattaaagggttaaacattgtgcccgggggattcttttccctttcgacgatacaaagatacaaccctgaaacccgcagaaatcaatagtctacagttgcacgcgattgttgtcaattatgcgcagtaacggtcggttattcaatggaaaaacgtaggatatgtgaatatgttttgttatttttgtaattgtaaatcagaaacttattcatcatgaacgaattcaaaatacgcgcctacggtcgcatggaactggctcaactttattctccggaactaactgacattgctgcatatcgaaagatgaagaaatggatctctttatgtcccggacttctgcaacgcctgtacgacttaggttacgaatcaaagcgtcgttcattcaccccgttggaggtgagagtgattgtagatgccttgggagaaccttagaagagcggagaagtaaagcaccgctttagcaatcgtaaagctatgctttaccacctctaaagcgccgctttaggattcatgaaacgtcttgttgttatataaatgcaaagaatgcactttttccgagggctccctaacacacgcacacatgcgtgcgcgtataaacgcctttatcgtctgtattgataagcaatcctttttttatcagacggttcagccagctaagagcagtgttaggtttgattttcatcttttcagcctgctccaacaactgtgtgcgggtgaactggttgcccatcatttcaaaaagtgcatcccggtcggcattggctctatgtttgacctctgtggaaggaagaaaagacaagatatgtgttgcatgacgatagagcggagttacaagttccagcaccgcatggaaatcttcagcggtgattgtcacatcccaacgggtgataatgccgtctttgatattatcggcggcaatctccttgtcaggagtcagcagaggggcggaagaacccttgaactgataaggctggtcgcattccagtgcacgtatcatagctatttctgccatgatgcggcacgtattgacagccagacgggctatggaactgctcatttcgttatcgttggcaagtcccgaacggaaaaaaagatcggcaaagagggcattgaactcttgcttttgctcatcagtgagccggagcgtatgaagcccgtgtgctttcatcaggtccagttgctttttccattccaggcctatgcctgtgaagatggcttccagatcggtttcgccactttcaaactggttgatccatgtccatataccgtgcatataataaaacagttggcgcgagaaaagaccgttctctgtcgagggaatgagtggttttacttgtgcgggtgtgccggaaagcaggagggagagatagcttttctttacctcccggtattcctggtcggtgcgccggttgtacgacaggcggtcgtggtcgaatgctttgcggagtgtatcgctccagtgtccgtattcagaaccgatagcagcggagatggtatccgcttcggtttcgcagataagtcctgtgccgttggcatccatgatattttgcagaatacctgttccggtgttattgcccgagatgagaaacattttattcttgggcatttgaggagcttccactttgcagcgctcctttcccatggtatcataggcggctttctcttttttgtaggccttgacctcttccgctactttttggcggatctcgtcatgaataggctctacaagcagccggatgaacaaaagaattcccttacccgaggcggaaggggctacaataaaactttgcaggtaaggagactggagtttgccggcgtatggacatctcacatatcgctccatgctggcacctatggcggtcaatgctccgagcagcatgacatcgcgttgtgtggggctggtggcataactcatgatgagcaacaggattttcggccagttcgcttcggtgaaagagggcaatggctggttcgggtcactcccgtcctgcagttcttcggattcgtccggttcttcattgtccaccttattatatacatgcgtgtgtgtgagatttttggacggtgcatttcctgcattttttgcatttttccggtggttcatcactccctctttgcagagagttacacccgccctttcagcaagatggaatgcagtgcccagatggacatctccatgccgggtagtaagtgcattggagaatatccgttcggcatgttcccgttcgtacttggcagacacccggcacaaccgatggaaaaactcgcgtcccgcttctccgcaatccgttgcgatggcgaacgccagttgtacatattcagcatacgtaggggcaatatccgctcctgcagtttcaaccgcctcacagaggcggcataacgattcaatatcagtcattattttgatttttgatttataatttatggttattcgttggtctaaataatgctcccgggtcatggcaaaggaagcaggatctcacaatgtctttaccggaaaagtccacgccttttttcttttctccgaaaggagaaggtgttcctgtaccatagatcatcaccgtgtataacattgctaacctcattttttccgtaatacagtttacgtcatcggccatgggtaaatgattatagggtatgaaggcttttacgcctcgtccgctaggactgataaacgtgagcacagggtggagaagaggatcattgaacaacgtcttacgcatctccactgcttcctgataggaggtgagatagtctatatctactactgttaggagggaaggatctatgaggcatttgctgctgcgacgcgagaatgtaccacagggagtcacgtatggtaatagtgatgcttttgccgttcgtatatcttcggagttgcgtacttgttcggtcagaactttgagattctcgttgcaggtaatcatttgaaagacttgctctacggagacttcgcagcagggaatgagcgtaggaggagtaactaattgtccgtgttcgtctttaatgggcgcaatgggaggcatgaaataagacattctaaaatcgtttgtcataatgtatctaattatttgattatcgccttgaattttcaaaacgcggggcgaaagtaggaatagcttttaaatcaactgttctgacatatcagaacagttataggtagaatcatgtattatttaataactttaacaattaacagaattacaaaaatgaaaaagtactctcatgtagcactcggtcttttcatcgccgagcagtttaagaaagcaggtgtgaagatagctcccatgtgtactgaaataggcttgggcaaagctgtctactatgcaaaggttataaaaggggagacgttcgtttaagccatttcacccgtcttttggcttacttttatgactatcataccaaagaggaatttcgagccaaagcaattgaatgggtcgatcgttatatcgattatcgtgagaaacacgggtgatgggaaagaaatttaatcaattgataataaaataatgcaggaagtccaacgtttcaataaagtcctaaaatcttttgtccttctaggggatatcatcttattgaacttgctgttatggatggttacttcgatttgggaaaaccggtctccatttgagtattcaatgcctcttctccagaacatggctctgatgactttatgttatctagtttgcaacatccgttcaggagtgatccttcatcgtccggtggttcgcccggaacaaataatgcttcgggtggcccggaatatgattccttttgtcttgatagtctttgggctttcatacatattccattttgaatgtgtcaatctgcgtcagttggggatattttatgtagttctcattatcgttatcatttcctatcgtctgacgttccgatctattctggaactttatcgcaaaagtgggaaaaatgttcgaaaggtagtgttggtgggtagccatgaaaatatgcaggaactttaccattccatgacagatgatccgacatccgggtatcgtgtattgggatattttgaagattttccgtcagaccgctatcctatgaatatagcatatttgggacagccgtgtgaagctgttgattatttgacccgtaatgcgggaaaggtggaccagctctattgtagccttccttccgcccgtagtactgaaatagtgccgattatcaactattgtgagaaccatctgattcgcttcttcagcgtccccaatgtccggaactatttgaaacggagaatgtattttgaaatgttaggtaatgtcccggtactttctatccgtcgtgagccacttgagttattggaaaatcgtattgtgaaacgtggctttgatattatttgctcgttactgttcctttgtacccttttcccgattatatatatcattgtgggactggctataaagataagttctcctggacctgtctttttcaaacagaaacgaagcggtgaggatggtcgtgaattttggtgctataagtttcgttcgatgcgggtgaatgctctaagtgatacacttcaggctacagaacatgatcctcgtaaaacccgaatcggtgatctgattcgtaagacgaatgtggatgaacttcctcaatttattaatgtactgaaaggggatatgtctttagtgggtccccgtccgcacatgttgaagcacacagaagaatattcccatttaataaataaatatatggttcgtcattttgtgaaaccgggtattacaggctgggcacaggtgacaggttttcgtggagaaacgaaggagctttggcagatggaaggacgtgtgcaacgtgacatctggtatatcgagcattggacgttcattctggacttatatatcatgtataagactgtgtgtaatgtcatccgcggggataaagaggcttattaggtgaggaattggaaattgagtaaaaattaaatcaatagttgtaaaattacatgagtaggtggttatgagaaaactgaaacgattgactttgggtgtgttacttgcttttttgctggtatcctgccaatcatataagaaagtaccttatttgcaggatacggcttttgtgaatgatacagaacagagtgttcgtcagacaggtgtgaaggttatgcccaaggatttgttgacgattgccgtatcttgttctactccggaactggctgcaccttttaatctggtaaattcgggtactgctagtggaacggagggaaagacggtaggacaaggaactgcatcatctgctctacagcaatatttagtagataatcaagggaatatcaactttccagtattgggcgagattcatgtaggtggattgactaaactggagatagaaaatctgattatagataagttgaaggtttatttgaaagaagcgccgcttgtaactgtgcgtattgttaattatcggatttcggtattgggagaggttactaagccaggaagctttgtagtctctaacgaaaagattaatttgctggaagcgctcgctatggcaggtgatttgactatttatggtatgcgcgataatgtgaaattaatccggacaggacaagataataagcaggaaattattactatggacttgaataaagctgaaacggtattgtctccttattatcagttgcagcagaatgatataatttatgtgacacctaataagactaaggcgaagaattcggatgttggaactagtacaggattgtggttctctggtatttctattttggtttcattagccactcttttagtaacaatattaaaataatctacaataagcgaacagtaatgaaagaaaactcgtacgacaataatatgaatgaactggatgaagaaaaagtaaattatcaggagcttttctttaagtatataattcactggccttggtttgtagcttccgttttggcttgtttgattggtgcctgggtatatttgcattttcagactcctgtgtatcaggtttcagcttctatcatgattaaggatgataaaaaaggcggcggcaataccactgatttggaaagtctcggattaggtggaatgattacttctacccagagtattgataatgagattgaagtgttacgctccaaaacgatactgaaagaagttgttaataatctggaactttatataacttattatgatgaggatgagttccctaaaaaagagctatataagacctctccggtaatcgtgaatctgactacccaagaggctgataaacttccaggcatagctttgattgacatgaaacttgcccctgaaggtggtttggatgtaaatttgaaagtgggcttgagtgaatatgctaaacattttgatagacttccggctgtgttacctaccgatgcaggtacctttggatttacattgaaagattccttgtcaaatggtaagatagaagggcaggatgtagtacggaatatcagcgctgtagtcagccagccgtttgtagtggcaaaaggatatcagtggtcattaaatatagaacccacctcaaaaacaacttctgtagcggttatttcgcttatgaatacgaatatgcaacgaggacaggactttatcaataagttgatagagatgtataatcgtaatacaaataacgataagaatgaggttgctgaaaagacaagggagtttatcaatgaacgtattaagattattgatgaagaactgggaagtacggaagataaactggaagtgtttaaaagaaatgcgggcttgacagatattagtagtgatgctcaattggctgtatcaggaaatgctgaatacgaaagaaaacgtgtagaaaatggtactcagataaatttggttcgtgatcttgctaaatatatcaataatccgtcgaatgagtatgaagtattgcccggtaatataggtttgtctgatgacggattaaccactcagatagaccgttacaatgaattgattatcgaacgcaagcgtttgcttcgcacttctacggaaagtaatccgatgattgtaaatttggacacaagcatccgtgccatgaaagcgaatgttcaggctgctattaatggaactttgcaaggcttatttatcgttaaggctgatttggatcgtgaggccagtcgtttttcccgtcgtattagtgatgctccaggacaggaacgtcagtatgtaagtatcgcacgtcagcaagaaatcaaggcgggactttatctgatgcttttacagaaacgcgaagagaatgccatcactttagctgctactgccaacaatgcaaagattattgatgaaccggtaactgatggaggtccggtatctccgaagcctaaaatgatttatatgattgctctggtgctgggagtagggctgcctgtgggtatcattttcctgattggtttgactaaattcaagatagaaggtcgtggcgatgtggagaaattgactcgcctgcctattgtaggtgatgtgccgttaacagaagaaaggaacggttccattgctgtatttgaaaatcagaatactttaatgagtgaaactttccgtaatgtccgtaccaaccttcagtttatgcttaagaacgatcagaaggtaattctggtgacttctacggtcagcggcgaaggtaaatcattcatttcttcaaatcttgcgatcagcctttctctattgggaaagaaagtggtgattgtgggtcttgatattcgtaagcccggtttgaataaagttttcaatatccctcgcaaagaacaggggattactcaatatctgtcgaatccggaaaaggatttgatggcttttgttcagccttcggatgttagcaagaatctgtatattcttcttggtggaactgttcctcctaatcctacggaattattggcccgtgatggtttggataaggcgattgaaacattgaaaaagaattttgattatgtgattttggatacagctccggttggtatggtgactgatactttgcttataggtcgtgtagctgacttgtcggtatatgtatgtcgtgctgactatactcggaaagctgaatttaccttgattaatgaattggctgatagtaataagttacctaatctttgtacggtcattaatggtcttgatcttcaaaagaagaaatatggttattactatgggtatggtaagtatggcaaatattatggctatggcaaacgttatggttatggctatggctatggagaacataaagtaaaagatgaataatttcagtgtatggggatatacaattggctagagagtaatatttattttagtcaaaatataacgtgtaacgggttttttgatcaccccgaggagtatttagttgtttgaagcccttccttgttataagtaatttatagatctagtagaattttggcaacaattttaaacatggtggagacgagaactgaaaagagtgttagaaatgcgaaagtagctttaattttttatctggtacagatattattgggctttttttctagaaaagcattttttgattacttaggtagtgaaatattaggattaaatacaactgttgcaaatttattaggatttttgaatctagcagaacttgggataggaacttcagttggttattttctgtataagcctttatttgaaaaagatcatgagaaaattaatgaaatagtctctttacaaggatggctctatagaaagattgcgtattttatgctaggagtttctgctattttaatggtattctttccattgatatttgctaagtctccattatctctgtggtattcttattctacttttggggttttgctatttagttcaatgttgggctatttttttaattataggcaaatagttcttaacgcagatcagaaaggatataaaattcagatagttgtacaaggatttgtggttgttaaaactataatccaaattttaggtatcacctacagtgcatttccatatgtgttttggatagttgttgaacttctctcggcagtcattacgtcttttttattacatagattattaaagaaggaatattcatggctaaagggaaatgttgcatgtgggaagagctatttaaagaaatatccagaggtattgaaaaaaaccaaacaagcattttttcataaaatgggtggagtcattttatcacaatcaagtcccttggttatttatgcgttcacaagtttatccattgttgctttatatggtaattatctattgattgtgtcaaaagttggagctcttatgggtgcaatattcaacagtacaggagctgcagtgggaaatttggttgctagtaatgatagaaagagaatcatagatgttttttgggaattaagcgattccagaatgtgtattagtacaatctgtattctttgtttattctatcttactaatccgttgataacattatggttaggtgctaattattgtttaggaaaggattttcttttattatttataatattaaccagtattagtatgctacgaactactgtagacagttacatttatgcatatggtctgtttcaagatgtatgggctcctgtattagaagctgttttaaatttgggattatcaatctgtttaggatacttttggtctctaaatggaattgtattagggataatactcagccaaatgataataattttgatatggaagccttattttcttttcgtaaaggggatagaagtagaagctagtaaatattttgttccaaccatttttagatatgctggtatattttttttatttgtagttacatattttatctttgattacttacagatagagactataagtaatttgaagcaattaattattagttcattatatgtatttcttatttgtactgtattaacttttggcgttttttatctattgtttcatggaacaagagattttgtaagtagactagtaacgatgttcaaacgaaataattcttaataatatacagtgaagcctaaaatatctgttattatacctgtatacaacgtggagaactatctcaattattgtatagatagtatacttttacaaacttttacaaactttgagctactgcttattgatgatggtagcttagatcgctctagtattatttgtgatgagtacgcagagaaagatgttcgcgttcgtgcatttcataaaacaaatggtggggtaagttcagcccgaaatttaggtattgaattatccttgggagaatggattgtttttatcgattcagatgacgttattggtgccgattatttaaggaatttcaatatagacgaataccctaataaagatctttatctaattaagggttttgaaaagggaggggataaaaaaatctttttttcaaatgctcctactgacctcataactgttgaagatgctattacaggtttgattggagttaatggactttgcctggctgtatgggggaagatgtttaaaaaaacaatattgaataaatataaaattcgttttgttgataaattatctttttgtgaagatcttattttttgctttaattattttaaacatattaatacggtctatgtatctgatgattgtagctattattataggcagatagaaaattcattgtcgaataaaattatcgactatagaaccgtgtacaaagctctaaagctacattctatagattatatctattttcaagaaagatattctgacaattttattatcaacaattactttgcgtcttttatcttagcttcaggtgtacttaggattattgaacagataatgaatgaggtttcaatatcggtgaaagaaaagaaaaaaataatagcagattgtagaaaattgataaaacaggtagcgtcaccgtctaaatatattaaactacctataaaacaagaaataaaactatttgctatcatgcatttaccgtacagtggacttgaactattatataaaatgaaatgaaaatcttcggattttataagtgatcctttttgataatatttgtagaacgaatcatattagataaatataatatttattaggtacttagtttagcgaatgaattattagatgatgatgaaaaatcacagtaaactcggggcaatggctgtacagcgatgggtgtatattaaatacttttgtgcgttatcagtagttgtttgccacttgtgtaaactgatatatcttggtcctgtattttcacagttttttgattttggtacgtatgcggtagctgtatttttctttctttcgggatatggattaacatattcttgtatttataagaaaaattatttgaaagactttttaaagaagaggcttttgaagatcttttttaatttattttatagcaacattgttatgggtagttctctcgcccctttctattcataaaataatacacacatatgaggtgtggcagatattgtctgtttatcccattctcccatatggctggtattttgttgttttgatgtttttatatctcattttatctctccataaaatggaaacgttctgtcttgatttatattatattgataattggttatatagtatgtttcctatttgaagtaggtgaatgggtatatatgacatcgccttgttttgcattaggtgtatggtatgcagaaaatgaaagtcgcttttctgtattcattcatcaatataaataccgaatacttgtggtgttgatgattgttttcatgtgttcgtggcgttcatatttcttaaggatgcttcatgtgacatatagtctccaaacattcaatggaattattagttgtaccataagtgcattggttttggttggtgtcattattataactttggaaacttgtaaactattatttcttacaagatatcatcttcctgattattcttttgagatatatctttcacaatgtatttccatatcttttgttacgcattatatgaatcaatctacatcaaatacaatgtttactatcgctaattttcaatgtgttgtttatgctgtatttatgacaggtattcttgcttttttatttcatttgataattaataaaattcaaaaatatgtatcaaaataagagaccgttgcatatcattatgccaatggcgggcgaaggttctcgctttatgaaagaggggtggactacgcctaagcctttgattaaactgaatggcagagaactttttttgcatgctattgatagcatagatatttcaggaatagaaatgaagtatagttttatagtgcggcaggaacatatagacaaatatggcattgataaagaaataaaagctattataccgcacgctaatatctttgccgttcaggaaacgacacgcggtgcggtagagacttgtttgatggctcgtgaggttattgaagaggaggatgctgtgctggtgatggactgtgatttggagtttattagtcaaggatttaatgtgttgatcaaagaaatcctttcaaaatccgtagaagaagtaaatggcggagtattggtgagtttcgattctaatgagtctagatacagttatgccgcgataaattcggaagggtttgtgacgcgtacggcagaaaaagaggtgataagtcgtcatgctctttgcggtgcttatttcttttcatcggcacgttcgtttatttatgcggcggacagtttgatgcatcaaactaatttctcaaagtctgagtactatgttagcttgctctataattacttgttgcagcgaggtgaaattgtgagacttgccgaaatggaggagtattattcttatgggactcctgaggaattgaatcgatatacacaatctgaatatcatgagtaatgcaacaatttttagcgaaaccatcagaagttaataatttttatgcgtgagattgtctttgtaaaataaggaagaagaacagccttcatgtttatattgtaaattggatattcgtagatctgctcagtttctttattcaatttataggagtatcttttgttctgattattataccccgattgttgttttcacactgtagttttgtacttctcaattgtctattttggtgaaggctagattattttgatattcttgacttatgaatctaaaacttattataaccgactttgacggaacattggtgaataccttcgaagccaattatcaagcttatgctgaagcatttacacagtgtgacagaaaattgactcgcgattcttatagacagtgtttcggctataggtatgatgactttatgcgagcggtaggcgttgacgatgctgacgtacgacaacgcatcaggaaaataaagggggaagtatatccttcttacttcgaatatttacaatctaacgaaccgcttatcaattttattcgtgcgtttcataggggtgggggaaaaaccgcaatagcctctaccgcgcgtcggttgaatctggttaatacgttgcgatatttacatttaacagaactctttgattgtattttggcaggtgaagatgtgactcacggtaagcctaatccagagatttatctaaaagtgatggaaagaatggaagtatctgctaggcagactttaatttttgaagactcggaagtaggctttgaggctgctgaggcttcgggagtacagtgtgtaaaaataaatcaagcattttatggatattgaagtaaaaggtcatagtggttgttccattgatatagtacgcgaaggtaaggagttgtttatccttaaaggtacttgtgaccccaagtatgtggagcgactttatcagcaggctttgaagcaacagagggctggtgaacaggaatatcagtacattcgtgtgccgcagattgtagatatagagagacaaacggatactatgatgatgaagatggagtatgtatattcacataatttcatagatcattttgaggcggctggatttgagcaagtgaattattttgtgaaagctatacatctattcttaaagcgagaaatagagcaatcaattatgacagatgtaccacgctcaatgattatcgagaagtttgaagatgtaaagagtaaaataaatcaaaatgtattgttgtgtatggatgaagaaataaaatatctgctacaacaatctgaaattcgcttcaaagttctgcccgaagtcttggagatacctgtaggttgttgtcatggcgatcttaccttctctaatattcttttcaatggtaataattattatctgatagattttttagattcttttatagagtcaccgctacttgatatggtgaaaattcgtcaagatacgcgctatcgttggagtacactgatgtatgaaggggaatttgatgagacgcgctttcatatagtgtcagatactattgatcaccaacttgatggtgcttttaaacagtatatatggtatcgtactttttatcatactttacagttgatgaattttctacgtattttacagtatgctaaagagaagaaaattgtggcttatcttaagaaaactattcaaagcatattaaattatgagtaaatatacattgattgttcccattgctgctgacactgataaaatggggaccgaaatgccttatctgtttgggctggatagcaatggcttgatgtattgcgtaaaatcgatcatggggttaccgttagaagcttttagtgatatctatttcactattctgcacaaacataacttacgttataaactattagaaatgatgcagattcagtttgaacgactaggtattgcacacaagacacacgtttacgagctttgggagtctacatcttcacagcctgaaacactttatcacacagttgtggggaatcatatcacaggtgcagtgctttttaaggatggtgatagttatttcacaaccgaagtgtatcctgaaaatatgctttatatctttccgctagatggtttgcaggtagtaaatccgcagaataaaagttatgtaacgattgatgaacagtattacattactaacattattgagaagaaaattgtaagccgtttcttctgtgcgggtggatacagtattgaggatgtacaagattttgtgttggagtatgaaaagctttctactttgccacagcttcatttatctcacattgtctattcgttgttgttgcagcaggctcattttcgccctcagatagtgaaaaactatcaagattggggtacaaaagaagattttattcgtaaaaataaataaatatattatgcgggttgtaaatttgtttcgtcgtaattggtgggcgatattatattttaattttaaaatgttaccgtttaggcaagcggtaaaatttccatttgatttctatggagccattcgattccaatctttaagaggtaaagtagagcttaatggacaggtaaggcgaggtcaatttcagtttggtcgttttcagtatgagatatttcataaagagccaacagttataacaattgatggtctatggaagtttaatggttcggttatgtgtatgggaattggatcgcaaatagagattcatgagaaagcaatttttgaaatgggagaagatatcgttttcggagctcgtgcacgtatttttatcagaaaaaatgttgtattacaaaatcatattagatttagttgggaggttcaattatttgactctaatttccattttatgcgcaatatagaaactggtatgattccttatataaataaatctgtttttattgatgatcattgttggataggaaatcggacaacaattaataaaggcactagaataccagcatattctattttggctggaggcagtatgacaaataaaaattatgcaaaagatggtaaaactcatttgactttagctgggtgccctgcaaaaattgtagcggaaggatatgagcgaatctttgaaacggaagaagaagaactttgtaatcaacttaacgaaagagaatataaagaaaatatatgaggcttggaataacgtattgtggcagagatcgtaaagggctatggagtggtacatgggatgcttttgataaatattttggagagcatgattcaatagaaagtatagagtgggtatctgtttttccaaatatctctagatggtatcagaaattgttaaccttatatagtagatgcttctattttaaggatggcaatcctttcgagttacagatgtatccactattcaaacgaaaaaccttgaaagaagtcaaactgatgggggccgagtggattattgccaaaactatcacagatgaatttcctcacgataagaaattttgcacctatgtggacgctgattttgaggaagtgatgaaaaccgatataaatcgtacaaaacttttatttaacttttacttgaattattatcaccaaaaagctggaatagcttatcgacgtcagaatcttatcttcacacagaatgagtggactcggcaatcgttaatgagaaagtttggcttggagccagagaagataataaatgtgggatttggcatcaatcttaaaacttatgaaggtgaaaagttgtatgataatgatttattgcttattgtacttcgacagtacaatgctaaagtaaaaggattagatctgcttgtagaagcattatccatagtgagaaaacaatgtccaaatgtgcgtttggctgtagtaggtaatgaacaatacaaaggggtggatggcgtggattgctatgtggatgcaccacgtgagaagaccatagaactctttcggaaggctactctctatgtgatgccttcgcgcaacgaacctaatggaatgacttacctcgaagccttgtgttacaaaacgccctttgtggctttgaatcgttttgccaccccggagttctctggtaatggcaaatggagttttctctgtgaaaaggaaaatgctcaccaactagctgatatcattatagatgcaatgagtgataaagcacgtctcaaagtgatgggtgagttaggtcagcaatatgtgaaagatacctttcgttgggaaaaagtagtagataagatgtgtagtgcaatgaaaaattataaaagataagcatggagaatctgaagggtaaaccgctagtaagtgttattgtgcccatttacaatgcagaacaatatctcactgcatgtgtggatgcattattagcacaaacctacacgcatatagagattctcttggtggatgatggaagcaaagaccgcagtggtatattgtgtgatgaatatgctcaacgagatagtcgtgtacgagtgctacatcttcagaatggcggagtgtcgcgagcaaggaatcatgcccttgaagtaatgaaaggagaatgggtgtgttttgctgacgcagatgatgaagtaactccatactatgtagagcactttgtggatgctatggaagaggggattgatgtgataatatcggaggtaatatttgttcatgaagagggcaggaacgaaaggctatcttataaaagacatggtacgttaccgctgaccgaaatcttttcaataaacgaactgagtgcccatggttacgcatgggccaaatgttatcgcacttgccacatgcgatcggttacatatgggctgatgctacgctttcctgaagagataaagtattcggaggacttactctttgtgatgcagtatttagaggtaagtccgcaggctaaatacatctcatatgctgactatatttactacctgcgtagtagcagtgctagtggcaagatatttcctttcaatgtggaacagagttgtttttgtcgatatattaaacagatgaagcggttgtcggctttggcaggagtggatttgatgcaaacgccttcatcgtcctcaattttagttatgctctttgctcgggtacgtaactgcatgtatatgcttggtgaacttacaagaaaaaagcgtgtgtggttttatcgatcggtgacatctgaagtgaaaaatactattttgaactctttacaatcgtctaatatgcttgtcaggattggctataagttgttcatggcaaacggatattggtatttgttggatgcctatttttatgtaatgatgaatttaaaacggcttttatcaaagaagagatgagtagaatggagtatattttacctgacaacgggaagcaacgattgggatggattgatatgatgcggggtatttgtatgttcttggtgatattgcatcacagtggagcgccggaactataccaaagatttctatctccttttttcttatccggtttcttttttatatcgggttatctttttttgaatccacagaagtcttttgatggaaaactgaaatttattcgtgttgtagagactttgctaatcccttattttctgtatgctacgctgacttatttcgtaaaagcactctatgtagaggtatggcagcaaggtaattggaacatctttatttcctactttgaagagctccttttaggtaagaaactttggtttatgtcggtgttagtggtatgcgaagtggcattgacagcattcttgtctgtctctcgaaaaccgatgtggatagcaacttttacagtgggtgtagctgtgttatggtgtggcacctcactatcttctggaaagttttatccatggtatttgggccaggcttgtatcgcattactctttatgtcggcaggcataggagcaagaatatatggtcaaatgttgcaagtggtgatgaaaaaaagtgtagccatcactttaggtatggtctatttgtcttgggtggcattggattaccattaccatctaactcatatcatgtttgccagtaactgtttcgaaccattgtggctctttctgttagtggctttggtgggagtaatggctttagccggaatcgtttcacatctacctaatttttcgtggctcacggctttaggaagaaatacattggtgttttatttcttctccaaccaagtgataatgttagtgttctcccaagtggagaaacttcagattggaaactattatatcagttcatggttggtggcggcagtcagtagtttgctgttggctatacctgtagtggtgtgcaataagtatctgccatggatggcgggtaaatgtacaatcatctcgaaaagatattcgttatgatgaaaatttttaaaactccttcaatatggatgcccattgtttttgctttgatggacatggcggggcggataggtaatattgggtatacactctattatccattgctgttgatattggcatttatatctttgaaacacaaaagtagaacagacgggatatttggtttttatctgttggcttgtggtatgagtattctattcaataatattccatcgttctataatatctatgtgcgatttgtagcatatattctactttttgtagcttttacacctttggtgaatagtagatatgcatcggtactgcggatgaggagtattcagtatttctgtttttttacggtatttatagtaggcataaacttcgtattttttaaaggaggcaacatctctgcagctcaacaacagatttatcagaatgtgggcatgtatgtaggtagtacgggcaataatgaaatgggagccttgggtgcaattagtttggcttatttggcagggcttttgatgtatagaaaacaattttttaataaagtatggattgcggtcattggtttatttatggtttcgaatgtggctatgcttctgatggcttcgtcgcgtagtgcggtattttgtgcatttgctgccattatcagcatgatatacgtgaaaaataaacaaaatttaggttcttttgctggtattctgttgggattctttttcttgatttttgtgctctatcctttctttacagaatatgcacgaggcattattgagtttaaacagggtggggacttgacggctttcgatacgaactcacgcgatgtattatgggcattgcgcatgaaagagtttgaaagtagtccattttggggtattggctttggaacgatttcggattataattcatggacaatagctagtggtggtacggtggaaacaggatcgagttggtgcgcagcattgagtcagacgggactgttgggaacgatacccattgtgtggatagtgggtggaaatttgaaatggttgctgtttacaaagaaagagcacgattatctaaccgtattacttacaggactaacaatcttcttcaccattcaccctatttcagaaggctattttacaacagtaggcgctatattgtgtgtattgttttggactgttcagggtatagtttacagtcttcgaaaaggggtctttaagacttcggatatacccttgttggtgattaatcaacgtaaattcagattattttgaatatggaatctactacttatagtaatgaatcaggaaaggatattgctaggacacgttatgtttggctggattactccaaggtgctttgtatagctggtgtggtatatgggcactgtgtggctgatgtgttaagtagttatatttttttgtttcatgtaccgatattctttattataagcggaatactttaccgtcctaaacgctatatagatacattgaaaagtttgttcgttccagtgttacttttcagtttgttactctatccatggcatttatacggcatttggaatcaaggacgcggttggtcgttcgagactatggtgatggagtttgtgatgggactcttctgttatgattttaaagtaggttttcctatcatccctcctttttggtttgtaatgacgctgcttgtgatgcggcttatatccgatacattgacgaaaataaaaatagatgagtggtggatgctccccctctgtgtagcggtactttacttctctgagggagatgatgtctattacgactatctgtttctgccacaaagagctttgctctgctttcctttctttctgtttggacaaaagttgaagccttgtcttaaatggattatccaattaaagtggcagttggctgttggtggattaataattgggctagtattccagtatttcttcggttctttcaacactataagttgtacaactaacatctttccttctttttatattattccggttgtagtctctttcgggatattcggtatgtgtataattatggccgactggaaggggagtctgcattggataacagtgttgtcgaatgggacattggtaatattgggtttgcatgaacttctactggtggtaatgcgaagactttcgggtggatggagtgcacagtttcccattatggaggtggtgatagtaatgctggtgctttacttccctatagtgtggatacaaaataaggtcccatgcttgattggaaaatttaaaagcaaataagtatagatatgatacctaagattattcattattgttggtttgggagcagtccacttccatatgaatttctaacatatatagatggctggaagaagatatttccagagtttgaaataaaatgttgggacgagaccacatttgatatttttgcttcactgccttttgtgcaggaggcatatcaagtaaaaaagtatgccttcgtggctgactatgtgcgtatgtgggctatgtatcaatatggtggtatctatatggatactgatattcaagtattaaagcgctttgatgagttcttgaactatcgtttctttactgctatggagtatcacggagataatgtccggattaaccacgtagaagatcaactcacttcccaaggatacaaaaaaaataaagaggatgtaatcattgatatatgtatagagtcaagcatatttgcagcagagaagaatcatccctttataaaagattgtttagattattatataggaaaacactttattttaccagatgggacatattatgataagataattgtaccagtaatcatggctctagaagcagaaaagtatggttttagatatgtgaatgaatttcagacactgaaagaggatatgcatcttttcccggatgagtactttactcacccctctaagcagacagaaaatacatatgctcttcatatggtgaaaaatagctggaagaaaatgaactttaaacagcgaatttatgcaaaattggcgcagataaaggtgataaaagccatatataataaactggagcaaatccctctagtacagaaaaaatttgataaaatacaacgtgatacatggctgaaataagcatgcagaaatcatctttgagaattgaatggattgatgtttgcaaggggcttggtatcttcttggttgtaataggtcatactagtattgcacaaatatcgcagacggtttataattggatttattcctttcatatgccgatgttttatatgctttcaggcatgatgttgaatgatagcaagtatagtgactttcggtcatatataaaaagacgattaaaaacattaattattccgttcttctgcttgaatacactggtatggttgatagtgaaaggacttaatatatctcatattcagactgattttacagaactcttaacaggctgtttagctatgtactttattcgtgctttatttgtttcagaattgtggtatttcttcattaataaactggcaagcaattgggtgttgaagttatttataatatttcttttaatagttctgtctgattattttcgtggtgttccttctgaatatataggtttaactagaaatgaggctattggtgtgatattacctagtatgccacttttttattatgccgtaggtcacgtaataaggaatatggctcttaatttaaatacgcatgaaattaaatattggctggtaagttctgtaatgatagtattgattataatatcatgccttttacaacctgttagctatggatattttcacatcttaccggccttttgtggtataataatattgggtttacttagtatattgttatcaagactatctgtaactttattaaactctacagtgtgctttattggtagaaatacattgattatagtagcgttccatcagattatctataattcaatgaagatattaacaaagtatttgtctctatccactgtgcaagatgcaacattgcgattgctcctattggcattaaccttatattttttaataagaagctttaataagtatgccccgtggcttgtgggaagatgaattttatatgactcaatcaatattacttgtaataatagtaattggtactattgcattaatcacttgtcgaagtggcgtagggatattattgggagaggtgaatatctatgataaagagatgacagagtgttatcgaggtgttgctattttttaatagtcgtgcagcattgtgcaggtgagctgggaactaatatttttactccttttggaggcataggtgtagcagtattcttgcttttatctggctttgggttgacagaatcatttagtaagagaggcatgagaggattcttgaagagtaaactgtggagggtatgggtgcctttcttattgttttatactggtatttatttgctttacgataagcataactataagaatctttttctgaatatatgtagtatcagacaagatgattattggtatgtgcactatatgctacgttgctatttggtgttttgggtagcatttaaattcttttataagtataggtggtatctattggtagcttttgccatttatacatttttttgtatggatgctattagggcagaacaatgtttgagctttccgataggtgtactcttatctgaaaaaaggaaaaagttccttttgctctcaaaaagaaaatatgtacaactaatggcaatattttgtattatagggttagtctcattagcaatcaagcagttgccagaagtgagggatttatgtggtacaccattttactctctagtagaatttggcataaaattacctttgggaatttctgttatgattattctttggttgttaccccatagatgggtgattaatccagttttagcattatgtggtgctttatcatatgaactgtatcttgtacatatgcagatgttgggtatggtacatagttcactctctgcttggatgatattgcttattagtatgctaatagcattttcattacagaaatttttaaaacaattacaaaacttcattttgaaatgaatttaatattcttgcaaaactgtatcagtccccatcagatgccatatattaaagaattgcctgtttatgaaagtgtagatagggtggtggtagtggcgccacgtattgattatgatgatcgcaaacagatgggatggaagactccagaattgcttaaggtagagggaatagagtttttgattactcctactatagaagtagtgcaaaaattatatgaggagtgcaaaggtattgaaacgttttgttttttttctggaatcaatgcttttcctgaaattgtgccatggatgaaactctcattcaattatccttttaagcgaggggtaataaccgagccaccattactctataatcatccactatggcagcataaactaagatttgcattgaaagattggcgatatataaagtattttgattatttattagtgatgggagatgaatttgtgccttattatcgcttttggagtaaaaaatggaaagtattaccttttatatattgtacagagtggaaagaacgtacacatcctataccgacttcagagaggcttaagatactctatgtaggtagtttgtcagatagaaagaatgtggtggaaatgtttcaggtgttgtgtcaaaaagtagaattagagcttggtatagtaggagatggcgagaagagagcgcagatcgaggaaatgaacatccagtctaaaacagaagtaacactctatggtatacaaccgatggagagggtctcggagattatgcaacaatatgatgtactgattttgccttcaaaacatgatgggtggggggctgttgtgaatgaggcgttgacagtaggattgtatgtgataacaagcaatcattgtggagcttcgtatttgttgaagaataagcaacagggaatgatatttactctagaagaagcacagggattaggcaatgtggttgatgcctgtattgcaaaaaaagattggataagggagacggtaaatgaacgcattatatggagtagaaactacatttcaggtaaagcggtggcaaattatatgatacaaaatttatgaataaacgcttatgagagtaatacattatattcctagtctagaccgtacatcgggtggtacaactgcttatatgcaattgttgactaaagaattgggacgattggtagagctttatgtggtgagtcacactagtgagaatcctgtaaaaatggataattgtaaggtgtatttcatacctgaaattagaaacttcatggagataaagcgacaatggaggatattgttaactcaattacaacctgatgtggtgcatgtaaactgttgttggatgcctgcttgtgcctttacacaaaagtgggcacaggcgttggggtataaagtggtgcttacaccgcacggtatgctagagccgtggattatggcgcgtcatcattggactcgtaaattaccggcattgtggttttatcaaaaggcggcagtgattaaggcggatgtattgcacgctactgcagaaagcgagaaggagaatttactgaagttgggctataacgataggattaagatcattgctaacggtattgatgtggaggatatagagatgaagtcatcatggaagcggaataaggagattcttttcttgagtcgtgtacatgtgaagaaagggattaattttcttcttgaggcagttgctcaattgaaggaacaaatggaagggtatgtgatacgtattgctggtgaaggagatgatatctacattgatgagctaaagcaattaacagtacgtcttggtatatcgaaactagtcatctttgaaggtggtgtatatggcaatagtaaatgggaactattccgtcaagcggatctttttatattacctacacatagcgagaattttggtattgtggtggcagaggcattagctagtggtacacctgtggtaacaacaatgggtacaccatggagtgagttggagagtcggcggtgtggctggtggacggaagttggtacagaggcaaccgtacaagcacttcgtaactttttatcgcttactgaaaatgagttggagaagatgggacgtaatggtcgtaaactggtagaggagaagtattcggcacataaggtggcagaggaatttgtggaaatgtataaatccattttatgaaaaaggatttgatggaatttaaaactccatattctaaggggaataaatttcgcagattggtatggagtatggtttggacttgttttgcccgtccgtttcctcgctctatggcaatgggatggaaacgtatgttgcttcgtgcatttggtgcaaagatcgcacctacagcgatggtgtatgctaccgcccacgtgtttcagccgtggctgttaataatggatgattatgcttgcttggcagagggggtagattgctacaatacagtattggtacgtattggacgtaatgctacagttagtcaacgggctttcctttgcacggcagggcacgatatatcagatccatatcatcatcaaaccgacgcttctattgtgattgaagatagggcttgggtgtgtgcagaggcttttattgggcaaggagttactattggtgagggtgctgtttgtgcagctcgtgcagtagtggttaaggatgtagagtcatggactgttgttggtgggaatccagcaaagtttataagaaaaagagttttaaattatgaataattctattgccgctattatattaacaaaaaatgaggcaaagcatattgtacgttgcatacgttcgctagaagggatatgtgacgaggtgattgttgtagactcactgagtacagataatacatgtgaattagctgaaagtatgggggctcgggtatatcgaaatccttggaaaaactatgctacacagtttaactacggggtgtatgagtgtgatattcagtcggaatggatttggcgcattgatgctgatgagtttttagaaggcaacttaggtgattcaatgaagagaacattggcccagtgtgatatggatgtaaatggcgtttatgtgcgcaaacgtatagacttcatggggcgtccgttgttacatggaggatggtatccatcatatcacttaaaggtgttccgtaagggacatggtgactgtgaaaatcgatggatggatgagcatatccgcctctttgatggtaaagcgattactgtgaatgaaggtaatcaggtggatgccaatcttaataatttgacttggtggacggaaaagcataacgggtatgcaactcgtgaaatggctgatatgctgatgatggagtatgctatggatgctaaagcacaggaagtagttcctaaactttttgggacggaggagcaacgcaaacgttggctaaaaatgaaatacattaagtcacctcttttcatacgaccttttgtcaactttactatccgttatattttgaaaggcggttttcttgatggaaaagaaggtttcatctggcacatcttacaaggcttttggtacagaatgctggtggatgcaaaggtgtatgaactgaagaagcaatgcgggtggaatgaagaaatgataaagacatatttgaaagagaaattcctatgatcttttgatatgtgtaaggtctttgatgtataataaaattttatgaaagtatctataataacgtcgtgctttaatcgtgcggcgacgattcgtggtgccatagagagtgtattggcacaggactataataacatagagtttattgttgtagatggggcgagtacggatggttcgttggagattattagagaatatgaaggtcgtatctcaactattatctcggagcccgatcatggaatgtatgaagccatcaataagggaattcgtgtggctgcaggtgatgtaatcggattgctacattcggatgatttcttctatgataatggggtcataagccgcattgtaaagcaaatgaagactactcgagcagattttctgtacggtgatggactttttgtaaatcctgataatacagacaaagtagtacgtaactggattggcggtgattatcgtttgtggaaggtacgtcatggctggcttccattacatcccacttgttatattcgccgcgaggtaatgatgagactaggtctttataacgaaagttataagattgctgcggatagtgaactgctggtgcgttatctgatgacgggcgggctttctgttacttatttgaaagagtatgttgtacgtatgcgcatgggagggctttctaccgatagtgctaagcgtaagaaaatgtggggagaagacattagagtgtactcctctcacggtctatggcctactctgactaaattagagaagatggcatggaaagtaccacagtttgtgttggcattattgaaaggataatggcaattaaatgagattggttgctgatttgtgcagagcaactagctattttctaaaaatagctcctgaagattattagcttataatataacgatacatgtaggtccctaatttcatgctacacacatgaatcccctacattttgcaggttgggaaaaatacagcggtatattcctgatctgtccccctcatattagcaaaatgctgatatgtattctaaatatatcaactgtctgtgaagatcgttgatatattgtttttttaatagcatgcttattgattaaagataatattcagatttctagttttgtataatagaaagaattagaatattttttattgattatctattgtgtttttgaaagaaaatgcatttctttgtaatatagataaaagcaatttattatgttgactactgtagaatatttatctttgcttcgtgagtatatgcgcaagaatgcagctaaatatggtatttctcgcatggggatatttggctccgttgctcgtggtgaacaacatgagggtagtgatgtcgatatttgtgttgaaattgatagaccttctatctttactttagttcatattaaagaagaattggaaaaactattgaaatgccctgttgatctggttcggttgcgaaataatatggatgaattattgagagggtgtatcaataaagatggaatttatgtgtaaaagtcagataatagaatcattgctaaagaaaattttccaaacggtggaaaggatattagcgaactcggaaactattacttccccttctttttatttattgactccatccggaatggaaagactagagagtacttgtatgttattaatagccatcggtgaaggagtgaaaggtgttgataaattaacagataaaaagttattatctttctatccagagatggattggaaaggtgtaatgggaatgagggatataatcgcacatcattattttgatttagatgctgaaattgtttatgacgtgataaaacatgatttgccgaagttaaaagatgtgttacaacaaatcatagacgatttgaaaatatccaatcaagcgattgactaaatggtttttatctcaaatttctaaaatacgcccgtatcttccgcataatcttgattcccatcactacgccatcaaatacagccataccggtattgaacgaacgcatgagtgcatccgccttgttggttgccggagcaagtggggcaaatatttcgcgtgtagtagctgtcatggcttttttttgagcatggatctcatttaaaagcttctttttacgttcggcaatctcttctaatgtaaatttctgcggggtctgcgcattcataatttatttatttgaatcagttaaaaataaattagcgaggaagttcaccatcggagaaatgatgagctgcttgcggaaaataataaccagggcgatgagaacaacattgatgcctgctatgatggcgaaactcgacatcagaccgcccactaaaggctccaatatataagcaagagcaaaaagcagataaaacagggcaaccatgccaaggataataagtactaatatcataattaacgtggaaaaaagtatggttaacttctccgtcaattctaatttggtatattctttttgaagctccagatatttcttgaactcgaaaaacaactgctgaaaattctcaatacttttatcgtctgcaaacatggtcgctctgtttttagtctttggttactcacttattctgctatttctcccttcatctcggcagcgatctcgtcaacgagagtttccatttcactgcgattaagcttgattccttttttacgaagaatctctgcgattttatgacgggtatcttctcccttttcaggagcaaataaaataccaagggctgcacctacggctgcaccacccagaaaagctgctaaaacattcaatcctttcataatgtataatgtttaaaatgattatgatacaacaaatataacatttttatggaaaggttgttcgtgaaaactgaaattttttgctacgttttataattctttttttcttttatggtttaatcttatttaactgactttcgtagctaacctttgaaggttaaggcgtacttttgttttcgaatattgtaaatcaaaacataatggaagctaagattgtttttataactggcgccagtagcggaattggtgagggttgtgcccgtaaatttgcgagggagggatggaatctgattctgaatgcccgtaccgtatcgaaactggaagaactgaaagctgaactggaaggggcgtatggtgtccgggtttatatattgccttttgatgtgcgcgaccggaaattggctgccgcctctttggaatcattacccgaagaatggaaggcgattgatgtgttggtgaacaacgccggactggtgatcggtgtggataaggaattcgagggtagcctggatgaatgggatatcatgatcgatacgaatataaggggactgttggctatgacgcgtttggtggtgcccggtatggtggaacgcggacgcggacatattattaatataggatctattgcgggggatgccgcttatccgggcggaagtgtgtattgcgcaacgaaagctgccgtgaaggctctttcggacggactccggattgatctggtggatactccattgagagtgacgaatgtcaaaccgggaatggtggagacaaactttacagtggtgcgttatcggggagataaggaagctgccgataatttttataaagggattcgtccgttgacgggagatgacattgcagaaacggtttattttgccgcgtcggctcctgcacatattcagattgcggaggtacttttgatgcctacttatcaggcaacaggcactatttcgtataagaagaagccggaatagacgtttttttgacggatttctttgccggatgataaaatttctattattttgttgcccgaaactaaatataatagacgagaatattgaattattaattaaaacagagtataggattatgaaaaaattagtcgtattaggaatgggagtatgcttggtgctagcatttgcatcttgtaaatccagcgaaagtgcctataagaaagcttacgaaaaagcaaaacagcaagaattggcagaaccgcaggtggaagctccggtagaggttactccggtggttgcagctcctgtgacaactactaaagtggcagatacatccggcgttcgtcaggaaaaggttacagtggtttccggtaacgaaggattgaaagattatagcgttgtagcaggtagctttggtgtgaaagcgaatgctgaaggcctgaaagattggttggacggacagggatatcactctacgattgcatttaatgctgataaggcaatgtatcgtgtgattgtgaactcttttgctgacaagactgctgctgctgaagctcgcgatgcattcaaggctaaatacccgaaccgttcggatttccagggtgcttggttgctgtatcgtgtatattgatttctttttggtaatatatattggaaagaacgaacgtttttttccgaataagaaggcggtaactgggaagttactgcttttttattgaaaatgagtggctttttcgtttagatatttttatctttctactaaaagaagttataaatgatagtggggaaacttttatagcaaagaaagtttttacttttgtcaactcttaatttggaggatgttttgcctgaatgtgaatagggcattaatttagagattgaatggaacaaaaatatgtaatggctgctatcgacgcggctctaaaagcaggtgaaaagattctttctatttataatgatccggcatcggactttgaaatagagaggaaagctgacaactctccgctaactatagcagacagaaaagcgcatgaagcgattgtggctattctgaacgatactccttttcctgttcttagtgaagaagggaagcatttagggtatgagatccgtcgaggatgggatactttatggattgtagatccgctggatggaacgaaggagtttattaagcgcaatggagaatttacggtaaatatcgctttggtgcagaactctgtacctgtattcggtattatttatgtgcctgttaaaaaagaactttatttcgggatcgaaggtgtaggggcttataaatgttccggtattgtcagtttggaagatgacggcgtggcattggaacaactgattgggaagtcggaacagatacctttgaaggaggtgcacgatcatctgatcgtggttgcttcccgttcgcacctgtcgcctgaaacggaatcatatattgcagatttgaagaagaaacacggcagtgtggagttgatttcgagcggaagttcaattaaaatctgtctggttgctgaaggtaaggctgatgtatatccgcgtttcgctccgacgatggagtgggatacggctgccgggcatgcgatagcccgtgctgcagggatggaagtatatcaggctggaaaggaagaacctctacgatataataaggaggatttattgaatccgtggtttatcgttgagccaaaaagagaacactaaataatgtttatatgacatttgaaattgtatttgtactattatccctattaggaatggtagcggctttgatagcagataagatgcgtccgggcatgatacttttttcggtagtggttttgtttctgtgtgccggcattctgactcctaaggagatgctggaagggtttagtaataaagggatgattaccgttgctctgctgtttctggtgagtgagggtattcgtcagtcgggcacattgggacaagtgattaagaagttgcttccgcaaggaaagacgacagtatttaaggcacagttgcgtatcttaccttcggtggcatttatttctgcctttctgaataatacgcctgttgtggttatttttgccccgattatcaagcattgggctaagtcggtgaatctcccggctacgaagtttctgattcctctttcttatgtgactattttgggaggtatctgtaccttgatcggtacttctaccaatctggtggtgcacggtatgatattggaggccggatttgaaggcttttctatgttcgagctcggaaaggtgggtatttttatagctattgccggtatcatttatatatttcttttctctaaacgtcttttgccggatgcacgtccggatacggctgtgccggatgaagaagtagaagaaggggagaagttgcatcgggtagaggctgttttgggtgcccgttttcccggtatcaataaaaaactgaaggattttaatttccaacgtcattatggtgcagaggtaaaagagatcaagacacgtaacggacagcgcttcgtcactaacttggacgatgtggtacttcatgaaggggatacgcttgttgtgatggctgatgatacttttatcccgacgtggggggaatcttctgtgtttgtcttgttgacaaacgggaatgaaccggatactagcgggaagaagaagcgttggtttgctttgttgttgctggtgctgatgattgtcggcgcaacggtgggtgagcttccgataacgaaggagatgtttccggatatcaaactggatatgtttttctttgtgtctattactactattattatggcatggacgaatctgttccctgcccgtaaatatactaaatatatttcgtgggatattctgattactattgcctgtgcttttgctatcagtaaggcaatggtgaactctggtgtggcggatagtgttgcgaagtttattatcgggttgagtgatgattacggcccgcatgtgttgcttgcaatggtatttattatcacgaacttgtttacggaattgataactaataatgcagcagcggctttggcgtttcctttggcactgtcaatctctgcccaattaggagtgagccctacgcctttctttgtggtgatctgtatggctgcatctgccagcttctcgacaccgatcggttatcagacaaatttgattgtgcaaggtatcggtaactataagtttacggattttgtacgtatcgggttgccgcttaatattatcactttcttaatctctattattctgatcccgttgatctggaacttttaaataaaattgtaaatggaagaaaagaaccatatatatccgatatttgaccgcatgatgacgcggcaggacaaagaagtgcttttggggcaacacagtgtgatgatctggtttaccggattgagtggttccggaaagagcacgattgccatcgcattggaacgtgaacttcataagcgtggattgctttgccgtatcctggatggggataatatccgtagtggaattaataataacctgggattttccgaaacggaccgggtggaaaatatccgtcgcatagcggaagtgtcgaagttgtttctggatagtggtatcattacgattgctgcatttatcagccctaataatgatattcgcgaaatggctgcaaacattattggtaaggatgattttctggaggttttcgttagtactccgctggaggaatgtgagaaacgtgatgtgaaaggattgtatgcgaaggcacggaaaggggaaattcagaattttacaggaatttccgcacctttcgaggttcccgaacatccggctttgtcactggatacttccaaattgactttggaggagtcggtgaaccgtttgttggagcttgttttgccaaaagtgaagtgtataaaatgaaataaatatggaagaatataaattaagccacttgaaggagctcgaagccgagtctattcatatcatccgcgaggtggcggcggaatttgagaatccggtgatgctttacagtatcggaaaggattcctcggtgatggtacgcttggctgaaaaagcgttttatccgggtaaagtgccattcccgttgatgcatatcgattcgaaatggaagttcaaggagatgattcagtttcgtgatgaatatgcgaagaagtacggatggaatctgattgttgaaagtaatatggaggcttttcatgcaggggtaggaccttttacgcatggaagcaaggtgcatacggacttgatgaagacgcaggctttgcttcatgcgttggataagtataagtttgatgctgcatttggtggtgcccgtcgtgacgaggagaagtcacgtgcgaaggaacgtattttctctttccgggataagtttcaccaatgggacccgaagaatcagcgtcctgaattgtgggatatttataatgcccgcgtgcataagggggaaagtattcgtgtattcccgattagcaactggactgaattggatatttggcagtatattcgcttggagaatattccgatcgttccgttatattatgctaaggagcgtccggtaattaatttggatggcaatattattatggcggatgatgaccgtttgcctgaaaagtaccgtgaccagattgaaatgaagatggttcgttttcgtacgttgggctgctggcctctgacaggggcagtggaaagtggagctgctacgattgaagagattgtggaggaaatgatgactacgacgaagagtgaacgtactacccgtgtgattgactttgaccaggagggtagtatggaacaaaagaagcgtgagggatacttttaattgtaactagtaatggcagataataaattagatataaaagcttttctggacaaggatgaacagaaagacttgttgagattgttgactgcgggttcggtagatgatggaaaatctacgttgatcggacgcttgttgtttgacagtaagaaattgtatgaggatcaactggatgcactggaacgtgatagtaagcgtgtaggaaatgcaggcgagcatattgattatgcgttattactggatggtttgaaggctgaacgtgaacagggtattacgattgacgtggcttatcgctatttttctactaatggccgtaagtttatcatcgcggatactccgggacacgaacagtatacccgtaatatgattaccggaggatctacggctaacttggctattatcctggtggatgcccgtaccggagtgattacccagactcgtcgccacactttcctggtgtctttgctgggaatcaagcatgtggtgttggctgtcaacaagatggatctggtggatttctcggaagagcgttttaacgagattgtagctgactataagaagtttgttgctccattgggtattcctgacgtcaactgtattccactttctgcattggatggggataatgtggtggataagtctgaacgtactccatggtacaaggggatttctttgctcgatttccttgaaacggttcatattgataatgaccataattttacggatttccgtttcccggttcagtatgtgcttcgtccgaatctggatttcagaggattctgtggtaaagttgcatccggtatcgttcgcaaaggggatacggtgatggcacttccttccggaaaaacatctaaggtgaaaagcatcgtgacttatgacggggaattggattacgctttcccaccgcagtctgtgaccttgacattggaggatgagatcgatgtgtcgcgtggcgaaatgttggtgcatcctgacaatctgccgacggtggatcgtaattttgatgctatgatggtctggatggatgaagaaccgatggatgtaaataagtcgttctttattaagcagactaccaatttgagtcgtacgcgtattgatacgataaagtataaggtggacgtgaatacgatggaacatctgtctctggagaatggtcagctgactaaagagatgttgcctttgcagttgaatcagattgcccgtgtggtgctgactacggctaaggaattgttctttgatccttataagaagaataaatcttgtggctcatttatcctgattgacccgatcactaataatacttcggcagtaggtatgattatcgaccgcgtggaaatgaaagatatgagtgacacggaggatattccggtattggatatggcaaaactgggaattgcttcggaacattatgaagcggtagagaaagctgtgaaggaactggaacgtcagggccttgcagtgcgactaataaaatagattgttcaacaataaattgaaaactgaaaatgacagcattctgtcgtctttaatttttaattcttaatttctaattaataaagtgggattactcgaatttaataaacttccgattaatacattggtaggtgccgactggaagacattcaaggctatcaccgccggtcgtgaaattgacgcagcctacaaaggtaaataccgattgacgaaggctgtgtgccgattgctttctccactggcgtcattacaagacaggcgttacgagaagttgctggctaatcagccgttggagcatgatccggtgttcattttgggacactggcggagtggaactacatttgtacataatgtgttctcttgtgacaagcattttgggtataacactacttatcagactgtatttcctcatctgatgatgtggggacagcctttcttcaaaaagaatatgagttggctgatgccggataaacgtccgacggataatatggaactggcagtggatcttccccaggaagaggagtttgctttgtcgaacatgatgccttatacatattataatttctggttcctgccgaaatatcagcaggagtatgccgataagtatcttttgtttgatgatataacggatgccgaattgaaggtgtttgaagaggtgttcacgaagttgattaagatttctttgtggaatacccagggaactcaattccttagcaagaatcctccgcataccggaagggtgaaggaactggtgaagatgttcccgaatgctaagtttatctacctgatgcgtaatccgtataccgtattcgaatctacacgcagtttctttacaaatacgattcaaccgttgaagttgcaggatgtcagcaatgaacaattagaggaaaatatcatttctatctatgcaaaactttatcataagtatgaatcggataagaaatttattccggaaggtaacttgatggaagtgaaatttgaagatttcgaagcggatgcgatgggaatgacggagaatatttatcagtctctttctatccctggatttgccgaagcacgtagtgatatagaaaaatatgtgggcggaaagaagggatataagaagaataagtataaatatgacgaccgtacgattcgtttggtagaagagaactgggattttgctttgaaacaatgggattataatttataagaagaaaaagaaaggaaaagtattgatgattcagaaaagcgttcatcgcctgttgatgacaggtttcgttgcatttatttcttccttgtctttgatggcgcaacataaagttgaaatgcttccttttggggacatggatcaatgggtggaccgtcagataaaggaatcgagcattatcggtgggaatacaaagaatgtatatgcgatagggccgacgacggtaattaagggagatcaggtttataagaatatgggcggatcgccttgggctacttcaaatgtgatggcgaaagttgccggtattacgaagactaatacttcggtatttccggagaagcggggagatgggtattgcgcccgtttggatacgcgcatggagagtgtgaaagtgttgggactggttaatattacggtgttggcggctggctctgtctttaccggttcggtgcatgagccgattaagggtactaaaaacccacagaaaatgttgcagaccggtattccgtttaccaaaaagccggtggctcttcagtttgactataaagtgaagatgtccgaccgggagaaccgtattcgcgctaccggtttcagcaagattacggatgttcccggaaaagattatccggcagctatcctgcttctgcaaaaacgttgggaagatgccaatggaaacgtgtatgcaaaacggatagggactatggtgacttattactatcattcgatggactggaaaaataatgcgacctatgagattatgtacggtgacatcacgaatcgtccggaatataagtcgcacatgatgcgtttgcaggcgactgaaagttatacggtgaacagtaagggtgaaagcgtgcctattcatgaagtggcctggggagatgaaaatgatgttccgactcatatgtgtcttcagttcacgtccagtcatggaggagcctatatcggttctccgggaaatacactgtggattgacaatgtaaaactggtatattaactaaagtatatagacaaagaatagaaatagtcagtgatctaatttcatcactgactattttttttgttttaattcttccacaacaaaccccttcagatgccttctgaagttatattacacttttatcgctctataaaattctatgaatgaatgaaaatttacgtgtttttttgtttgtgttatattaaatatctatatttgcactaattttagaagaaaggatgacgtttattgtctcttagtcaggtgtggaacatttgggttgtgtatctagcctgtaagacaattgaaatatattatttactaaaataaattgagatgaaaaagggtttattgtttattttattggcagcagtctcagtatgtctgcctgcacaagaaaaagaaaatgcagcaaagagttatagagtggaaacaaatcgctttggtgctaactggtttattagtggtggcgttggcgcacaaatgtattttggcgacaatgatggtaaagctgacttcggaaaacgtcttgctccggcacttgacattgctgtaggtaagtggtttactccgggtatcggattgcgtgtagcttacaacgggcttcaggctaaaggtgctactcctaatgctaatggtccgcttgtagacggaggacagtattctaatggctactacaaagaaaagtggaatgttatgaacttccatggagatgtattgttgaatcttaccaatatgttctgtggatataaagaagatcgcgtgtactcattcattccttatgtaggagctgggtttgtacatacaggtaaaggtccgggttatgacgaactgggtatcaatgccggtttaatcaaccgtttccgcctgtcttctgctttggatcttaacgttgaattgcgcggacttttgatgaaaggcgcatttggcaattcaggtcctgaaggattggctggtctgactgtaggtgttacttacaagtttaagaaacgtggttgggatgctgttcctactgtaccaatggttccggaaagccagttgaacgacatgagagacagagtgaacgctttgaagggtgaaaacgaatctttgaaacgtgacttggttgaagctcgtaacaagaaacctgaagtgatcgttaagaaagaagctggattcgttccacgtctggttgttgtattcaatatcggaaagagcaacatcagcaagagagaatacatgaatattgaagctatggctaagggtatcaaagcaactgataaagtgtttactataacaggatatgctgataagggtactggttctgctgaatacaacatgaagttgagtaagaagagagctgaagctgttcgtgacctgatggttaatgaatttggtgttcctgcttctcaattgaaggttgattacaagggtggtgtaggcaacatgttctatgatgatgctaagttaagccgtgtagctattgttgaagaataatatacatttgaaataatagaataaaagagacgtttcctttcacgggaagcgtcttttttgtatttttgtaccccatgagcagaatagtagcaatagattatggaagaaaacgtaccggaatagctgtgagcgatacaatgcagctgatcgcaaacggattgacgacggtgcccacgcatgaacttctgaactttatcggtgaatatatagctaaagaaccggtggagcggattattattggattgcccaagcaaatgaataatgaggtttcggagaatatgaagaatatagagccttttgttcgttcgctgaaaaagcgttatccggaccttccggtcgaatatgtggacgaacgtttcacttctgttcttgcacaccgtaccatgttggaggccggcttgaagaaaaaggaccggcaaaataaggcattggtggacgagataagtgctactattattttgcaaacatatttggagagtaaacgtttttagtataggacataagaataacttaattttttagtagagtataaaaatatgattttacctatttatgtatatggccaacctgtattgagaaaggttgcagaggacataacaccggattatccgaatctgaaagagttgattgagaacatgttcgaaacaatggtacatgcagacggtgtaggattggctgctccacagattggtttgcctattcgcgtggttacgattacattggatccgctttcggaggaatatcctgaatttaaagactttaataaggcttatatcaatccccacattctggaagtagggggtgaagaagtgagtatggaagagggatgcttaagccttcccggtattcacgaaacagtgaaaaggggtgataaaattcgcgtgaaatatatggacgagaattttgtggagcatgaagaagaggtggaaggttatctggctcgggtgatgcaacatgagttcgatcatttggatggtaagatgttcattgaccatatctcaccgcttcgtaagcagatgattaaaggaaagctgaatacgatgttgaagggaaaagcgcgcagttcatataagatgaaacaggtgaaataaagataaaaaacgtttatatccctgttaagtaagcgaaaaacattatttttgcttcgtttacaagcataaaatatcaatggtaaaaagaatcttaacagttttattactgttcccaacgctggtgtgtgctcaaataaatacggatcgggtgatgactattgcccgaaacgctctttattttgaggactatgtactttctattcagtattttaatcaggttattaacgctaagccttatctgtatgaaccttatttcttcagggcattggctaaactgaatctggaggattttcagggtgctgaagcagactgtgatgcagctatccaacgcaatccatttgtggtgggtgcttatcagattcgtggtttggcaaggattcgtcagagtaaatttgatggagcgattgaggattataagaaagcattgcattatgatccggagaatattactttatggcataacctgacattatctcatatccagaagaaggattataatgctgcgaaagaggatttggaaagcttgttgaaggtgtctccacgctatacccgtgcttatttgatgaggggggaagtgtctttacaacagaaagatacgattgctgccttgaatgacttcaataaggcgcttgaactggataaatatgatccggatgcttgggctgcaagagcgattgttaaattacaacaggctaagtatgcggaagcggaagcggatttcaaccgtgctattccgttgagtgctaagaatgctggaaattatataaaccgtgcattggctcgttttcatcagaataatttaagaggtgccatgagcgattatgatctggcattggatattgatccgaataactttatcggtcattataaccgcggattgttacgtgcacaggtaggagatgataaccgggctatcgaagacttcgactttgttatcaagatggagccggataatatgatggctgtctttaaccgtggtttgctgcgtgcgcaaacgggtgattatcgcggggctatacaagattacacaactgttatcaatcagtatccgaacttcctggccggatactatcagcgttcggaagctcgcagaaagattggagataagaagggtgcggagcaggatgaatttaaagtcatgaaggcgcagatcgacaagcagaacggtgtgacgaacaaagatgtagcacagaacaaggataaggaaaatgatgaggaaggcggagagaagacccgtaagaaatccgataagaatatgaataactatcgtaagatagtgattgcggatgattctgaagccgaacaacgctatacaagtgattatcgtggtcgtgtgcaggataagaacgtaaatataacgctggagccgatgttcgctttgacttattatgagaagatgagtgacgtaaaacgttcggtgaacttccacaaatatattgaagacttgaaccgtacgggtatacttccgaaacgtcttcgtatcacaaatatggaagctccgttgacggaagaacaggtgaaggtgcattttgccttgattgatacgcacacatcggcgattgtggaagatgacaagaatgcttcgaaacgttttgcccgtgcaattgatttttatctggtgcaggacttctcgagtgcggttttcgatttgacccagacgatcttgctggatggtgatttcttcccggcatattttatgcgtgcgctgatccgttgtaaacagttggagtatcagaaggctgaacaagctgtcgaaacagatgttgttccgggtgataataagcgtaaggagattaccgcagtagattatgaagtggtcagaaaagacttggataaggtgattaatctggctccggactttgtatacgcatattataatcgtgctaatgtttctgccatgttgaaagattaccgtgccgcaattatcgactacgataaggcgatcgagctaaatcctgattttgcggatgcttatttcaaccgtggactgactcatattttcttaggaaataataagctgggcatttcagatttgagtaaagccggtgagttggggattgtttctgcttataatgttatcaaacgttttacagatcaatcggaataacatttttttgataaaaaatagaaaactcaaaagatttagttacttttgcgttcaaattatgaaaatataacatcatcatattatgataaagataacatttcccgatggctccgttcgtgagtataacgaaggagtgaacggtttacagattgctgaaagtatcagctcgcgtctggcacaggaagtgctggcatgtggcgtgaacggcgagacttatgatttaggacgtcctattaatgaagatgctaatttcgttctttataaatgggatgatgaagaaggtaagcatgcattctggcatacaagtgcacacttgttggcggaagctttgcaggaactttatccgggtatccagtttggtatcggaccggctattgaaaacggattctactatgatgtggatccgggtgaagcggtaattaaagaaagcgaccttcctgccattgaggctaaaatgttggaactggctgcaaagaaagaagacgtagtcagaaaaagcatcgtaaaaacggatgctctgaaaatgtttggtgatcgtggcgaaacatataaatgtgaattgatttctgaactggaagacggacacattacgacttatacgcagggtgcgtttactgacctttgtcgtggtcctcacttgatgacgactgctccgatcaaggctattaagttgacttcagtggctggtgcttattggcgtggtcatgaagatcgtaagatgctgactcgtatttatggtatcacgttcccgaagaagaaaatgctggatgagtatctggtgttgttggaagaagcgaagaagcgtgaccaccgtaagatcggtaaggagatgcagttgtttatgttttctgaaactgtaggtaagggacttcctatgtggttgccgaaaggtactgcattgcgtctgcgtctgcaggagttcttgcgtcgtatccagacacgttacgattatcaggaggtgattactccgccaatcggtaataagttgctgtatgtgacttcgggtcactatgcaaaatatggcaaggatgctttccaacctatccatactccggaagagggggaagagtatttcttgaaaccgatgaactgtcctcaccactgtgagatttacaagaacttcccacgttcttataaagaccttccgttgcgtatagctgaatttggtacggtttgtcgttatgaacaaagtggagagttacatggtttaactcgtgttcgtagctttacgcaggatgatgcgcatatcttctgtcgtccggagcaggtgaaagatgagttccttcgtgtgatggatattatatctattgtgttccgttctatggatttccagaattttgaagcacagatatctttgcgtgataaagtgaaccgtgaaaagtatattggtagcgatgataactgggaaaaagcggaacaggctattatcgaggcttgtgcggagaagggcttgcctgctaagattgagtatggagaagctgctttctatggtcctaagctcgactttatggtgaaagacgctatcggtcgtcgttggcagctgggtactatccaggttgactacaacttgccggaacgctttgaacttgaatatatgggctctgataatcagaagcatcgtccggtgatgattcaccgtgctccgttcggatcaatggaacgttttgttgctgtattgattgagcacactgccggtaagttcccattgtggctgacaccggaacaggtagttattctgccgatcagtgagaagttcaatgaatatgcagaacaggtgaagatgtatctgaaaatacacgaaatccgtgcgattgtagatgatcgtaacgagaagatcggccgcaagattcgtgataatgaaatgaagcgcattccttatatgctgattgtcggtgaaaaagaggcggaaaatggtgaagtttctgttcgtagacaaggcgaaggtgacaaaggaaccatgaaatttgaagaatttgctaaaattttgaacgaagaagttcagaatatgataaataaatggtaactttgcagccgtttcagaataaaatatttagtataacaataaaaagatcaaactaggaagtaaacgtttttaatgaagaatgacactctaaaagggcaatacagaatcaatgaacagattcgtgccaaggaagttcgcatagtaagcgatgatattgaaccgaaagtatatccaatctttcaggctctgaaaatggctgaagaaaaagaattggatttagtggaaatttctcctaatgctcaaccccctgtttgtcgtattattgattattctaaatttctttatcaattaaagaaacgtcagaaggaacagaaagcgaagcaggtgaaggttaatgtgaaggagattcgttttggtccccagacagatgaccatgattacaactttaagttgaaacatgctaaaggattcttggaagacggtgataaggtgaaggcttatgtattctttaaaggtcgttctatcctttttaaggaacaaggtgaagtattgttgcttcgttttgcgaatgatttggaagactatgctaaagtggatcagatgccgatattggaaggtaagcgtatgactatccagctttctccgaagaagaaagaagctcctaaaaagtctgcaacggccggagcaccgaaacctgctactcctgcacaaaaagcagagaagccggaaacgagcgaagaataagaaaaggatgcgtaacgcgcaggtatagtgcgttgccattatatatttaataatttaaaaacaagtaagatgccaaagatgaagactaactccggttctaaaaaaaggtttacccttaccggaacaggtaaaatcaaaagaaagcacgcttttcacagtcacattttgactaagaaatccaagaagagaaaaagaaatctgtgctactctacaactgttgatacaacaaatgtaagccaggttaaggaactcttagcaatgaagtaatcaaaagcgtaaaagtattattaaagtattaaccgaatgcattagcctgaagttcgctgcgtgaagtagcggcgctaacattcaaaaaaagtaaaactatgccaagatcagtaaatcatgttgcttcaaaagcaagaagaaagaaaattttgaaattgaccagaggttactttggtgcaagaaagaatgtatggaccgtagctaaaaacacttgggaaaagggtttgacttacgcgttccgtgaccgtagaaataagaaaagaaacttccgcgctctttggatacaacgtatcaacgctgctgcacgtcttgaaggaatgtcttattctaaattgatgggcggtctgcacaaagccggtattgaaataaaccgtaaggttttggctgatttagctatgaatcacccggaagctttcaaagctgtagttgctaaagctaaagctgcttaagcatcaatagtttacgagttacaaagtgtcagttactaagctagtaactgacacttttcttttgttaggcggataaaagggagtgaaaaaaatgttagtaggtaaacaaattccttttttttcttgttagtctcatagattcttattacatttgtgatacaaaaatattagccgtatcgactggatcgggaaactcttcaaattaatctgatgcaccgagaaagcttcgttcttcaatggcgggccacatccttcgggacagctttaagccggtggattacaaagagggcgagcgctcaaatcttgttctatcagagtttcatcacatcgtcgatgcggctttttttatatacttttctatgatattttatttctccggtacaggtaattctaagtggattgcaaatcagctttccaaagagcaaaaagaagagttggtttttattcccgatgcgctaaagaatgaagcattggagtttagtttgcaggcaggtgaaaagatcggttttgtatttcctatctattcgtgggctcctcctgaaatcgtacttaattttattcggcaactctctttaaaggggtataaaagacaatatttgttttttgtttgttcctgtggggatgataccgggcttacgcagcaggtgctggagaaggctttgagtcataaaggctggaagtgtcatgcaggcttttctgtgactatgcccaataattatgtattgcttcccggttttgacgtagataagaaagaattggaggagaaaaaactggcagatgctattccgactctcaatcaaataaatgcttcaataagtaggagagaggagttgtttctttgtcatgaagggagtattccttttattaagacgaggattatcaatcctttatttaatcgctttcagatgtctcccgggaatttttatactacggatgcttgtattggatgtaagcgttgtgagaagagttgtccggtagggaatattatgatgatgggcagaaagcctgtttgggggatggattgcacctcatgcctggcatgttatcatgtttgtccgcagcatgcggtgcaatatgggaaaagaacgaaagataaagggcagtatttcaatcctaattaatctactcgccaattaatctactcgtctttgattttaatgcagcaattggataagtcttcaatgatagccaggctttctactctgacgctttgctcctcaagttttttacgcccattttggaaggctttttcaataatgaatcccattcctaccaagtttgctccggattgcttgatgaggtcgataatgcctaatgcggcattgccatacgcgaggaagtcatccacgaaaagaacattgtcatttggagtgaggaaatcggcactgataacgacttcataatcacgatctttagtgaatgagtgcacagtggtgcttagtgcattctggatggttttaggagacttcttctttgcaaatacaactggtaaatccatcaggtagcctgtcatgatagcaggggcgatgccgctggcttcgattgtcataatcttatttacgtttgtggctgcaaaacggcggacaaactcaactccgattgatttcatcaggacagggtccatttgatgattaataaaaccgtctactttcaggatacctccttcgtagcactttccgtcttgcagaattctttttttaagtaattgcatgctgtatgatattaattaaataatgtgctaatattccattccgcatggtgaacagcggttggtatattagcacatggaaatttgaattgttacttgttgtctcttaagtcttttactcggacggcttttccttcgctttgcgggagagagcctttttttaccagtttaactttgggagtcaccaatatttcatcctttaattggcgggttatatccttgcggatcttctccagttcaatataattgtcagtggaaaggtcgcttaattctacttcgacgatcatctcgtcttggttgttgactgtttccagtgtaatcaggtaattgctgcctaattcgggaaattgtacgagtatcttttctacttgcatcgggaagatatttactcccttgataatgaacatatcatcactgcgtcccttgatacgatcaatacggatgtgcgtgcggccgcaggggcattttcccggaagaatacgggttaagtcacgggtgcgatagcggattaacggcatcatctcccggtcgagagtcgtaagtactaattctccgatttctccttcctgaacgggttctcctgtttccggatcgataatttctaccagataacagtcttcccagaagtgcattccgttttgttcctgacattcgaaagcaacaccgggaccgttcatttctgtcataccgaagctgttgtatgcttttacgcccagcatcttttctattttccggcgttgttcgtcggtgtgaggttcagcaccgataaccagcgttttcagtgtggttcctttgggatcaaggccttcttcctgaaagacttcggcaaggcggatggcatagctggggatagcatgtaaagcggtagtcttgaagtcgttgatgaatttaatctgtcgtttactgtttccggctgcggcagggactgtcagacagcccaggcgttctgcaccgtattggaagcctaaccctcctgtaaacataccgtatccggagctgttttggaagacgtcggtcttgcgtattcctactgcgtacaggcagcgggctaccaggttggcccaggagtcgagatcgtgctgtgaatgaacaataactgtcgggtttccggtagtaccactagaagagtgaatacgtacaccatcattgctcatatcacctgctaccagcccgaaaggatagtgggcacgcatatcggctttggtagtaaagggcaatttgcggatatcgtctaatgattgtatgctatctgcagtgatgccatgtttgctgaaaacttctttgtaatatggggagtttgcagctatattgattgttttcttaagccgtcgaagttgtaattcctgcaacttctcccggctcatggtttctagttcttcttcccagtattgtgtattcatgataatgcctgttattacattagcttttctgcaatttccttgccggcagccaatgctttaagattcatttctacaattgcttctcccttgcgcaggaagatttcacggatgctgtcttgtacttttccgtagtcgatgccaaggaatggaatggttgctcccagtaagactatgttggcaacgcgggcggagcctacttctttggctactttgtctacgttcaacacaattttgtgaggcagcttattgatttctgccattactttgtctgcttccggataattggggatattgacaaacggagtttcgttagtcactaaccaaccgttagggctaagataagggaggtagcgcaatccttccatgggttccaatgaaatgataaggtcgcatttacctgatgggatcaagtctgaagcaatcggctggtcgctgatacggaggttggattgaacatctcctccgcgttggctcattccgtgcacttctgcttgtttcatatataatccttctttcaaggcagctttgccgatcactgtagcaatagacagaattccctgtccaccgactcctgataatataatgtctttcttcatggcttacttacttctttttttgcgtgctaatgtctggatacactctctacgtggaataatgacagatacaccacggtattcgatctcttcgcgaatgatttgcttcatctcctcatagtttttcttcaacggagtaacgacgcggatatgagccggatctactccgatacctgcacagatcgcttcgatacgtccggttccggcagagtcctgtccgcctgtcatggcggtagtttcattgtcggagatgacgatggttacactggcattctcgttcacacaatctaatagtccggtcattccggaatgggtgaatgtggagtctccgatgacagctacagccgggaaaagacctccgtcagccgcacctttcgccatcgtgatggaggcgcccatgtctacgcatgagttgattgcattgaaaggagcattcgcgcctaatgtgtaacagccgatgtcgctgaatactttatgagatgggtattcttctttcagaacttcggttagtgtgatatacatatcgcgatgtccgcaaccttcgcaaagtgcaggcggacgcatttctacgacagaaggaatgccgaattccgatttattctctttgcctacggcgcgggctacagagtccggatttaattctccatcctgtgacagagtgccgtccaagcgtccttttactttaacgccgatgcccagataacctttcaattgtttttctacaaatggttgtccgtcttccagaacgaggatttcgtcacaggagtcaatcaattgatgtaattgctttttaggcaatggatactggccgattttaagtaccggatattcgcaaccttcaggatagttttccatcagatagttgtagccgatgccacaagcgataattcctaactttttgttaggaccatctgtatatttattataaggtgattcttccgaagctttgataaactcgtcttggcgcgcaagtaatactttgtagcgtttgcgggcatttccaggtaacaagatgaactgacgaggatcttcgctgaaagagatgccattctgtggtttttgtgctttgcgttctactccagagcgggagtgtgcaaggcgggttaccatacgcatcaagataggttcgcccaatttttcagagaattcgaaaccactgtataccatatcatacgcttcctgctgattgctgggttcgtacataggaatcagtgagaaatctccgtagaaacggctgtcttgttcgttctgcgaagagtgcatgctggggtcatctgctgctatcacgatcaatccgcctttcacacctgtgatggcagagttgacaaaacagtcggcagctacattcatacctacgtgcttcatacaaactaatgcccgtttaccaacgaatgacatacccaacgcagcttccatcgctgttttttcattggcacaccaacggttgtgtatattctgttcggtcgttattggggccatttgaatatattccgtaatttcagttgaaggagtaccaggataggcataaacacctgaaagtccggcatccagtgcagcttgtgcaatggcttcatcgccaagtaagagttgcttgctcatatatatttcttttatttagtgttgatcacagtttgttaatctatcgggcaaagataggcttttccgttcgttttatcacaaatttacttgaaaatctttctttcattcagggctttccagtattttcttgcatttgccatgtggtcagcataattggatgcaaagttgtgagttccggaaaaatcttctttagcacacatgtagatatagttatgtttggtatagttcaatacgctgtctattccctttttagaagggatacggatggggcctggaggcagaccggtatttatataggtgttatagggggaattgacttttaaattttcgttggtgattcggcgcagaccgaaatcctgtagtgcaaatttgatggtaggatctgcctgcaaaggcatatcttgatgtaaacggttgatatataatccggctactattggcttttcttcgttgttgttggtttcttcttcgacgatggaagcaagagtgctgacttcttccggtgtcatgccgatagcggtggcttgtgccagacgttctttgttccagaagcgttcgtgctcattcttcattcgtttaaagaaatcgtctacgctcatgtcccaatatacctgataggtttcaggtatgaaaaggctggggagtgttatggttgtgtatcccatttgagcctggaaagtagagtcgaataactggctggcgatttcggcagagtctatcatgagttgttttccaatgcttcgtgctaatcggtctaatgtccggacgcctccgatagtaaggttcataggctcctgataacctctggaaaaacggctatatacatgataaacattgtcattggggcgaatggcataacgaccggtatggatattctgatcgaaatccttgtattttgccatccactggaatccggtgaacttattgacatgcccgaattcttttattttatggtagatagaatcggcagtatcatcccggtctacataaatatatacggttttagatgggtgaaattggggggcaaacagataataataaaaggtgcctccggcaactgcacaaaggaggaatgctccgattagaattgatagtagaatatttctcttttttttcttcatcttttgaggtgtatttaaaaagttcgtcaaagataaaaagaatttggataggagtgttctctttttaggatgaatcataagaagactatatcaaaagtatgttttctttcgatgcggtaatgaatccattctttcacgttgcgtttgccttgcttgatttattcagttgcttattgtgctgcttggcattcattgcaattatctttttgtttccagcgtagttccattattcccatatattgtgggactattttctcgcaatatatgggaatgttttctcataaaataagagaatactttcccacaatatgtgggaataagacaatctcttgacgttacaatgtgaaaccttgagagtaatacaacaactcccttttattgaagtgcaagtctgtttgtaactagaatgccattggcacagggaaatgaattcatttcagagaaacgagttttgctacttaattaggccacagggagtaattaatatctgcttctattttgttttctatctcatcgggcagaggtgcgaagaaattcatgttagtcaggctctcgatgctatctattgttaccgtataggatgatagaggttctactgcctgctcattattgaataagaaaccgatagctcgcatcggcttgacaaaaggagaaaggactactttaaaaaacttttgaggtactacgactttattctttccgattgttttgggatgtttttcaataatagggccacatataataatgatggcgctgtctgctatagcccaatcccggatcttttcttccaggtttttccatcctcttctgtttagttgtggatgttgcggacacatattgctgaaataaaatgattctttcatggcttcaggactccatttcatatctgctgcgggagccatgtgtcctttgtcgtatcctgaacgggtatagtcggcatttgtggcaatcggacctgtcactagtggatcggcaataaagcgattacctcttttttcttttcctttggtttcttccctggttaattcgtaagaaacccagttgggaatttttaaatctttgttatatgataccgtatatccgctatggcggatgatttgttcttgccggggaactagtgatacaggtgtctccagatctttgccaagtggaatttgaagggagacatcggtttgaggttcattattattctgggtattaatctgttggcaatataaatagacgccaaaaagaataggaatgagcacaatgatggcgatgatacatcctaatctgttattggaatgtgatttctttttgaatagctttctgtttttaccttttttacttcgattcattggttagctagtaatggcgggtttgttttattcttcttttctcatgctgaattcacaaccgcaatattgttggttgtagaagttatactctttaatgatggcgatgcgtcgttcgctaagtccgcctttccgccaattctgttcccagtatgtgacatccgggtatgaagcggtggcatattgtccggcttcattaatctgctccagacttttccaacgactggaagcaagcgttgtggttattatggaaaggccatgttcatgtgcataacgggcggtctccaataagcgtagtttaaagcaacgtaggcagcgtcctcctctttcgggttcctgctccattcctgctatatggcatcgccagttttcatgatcgtaatcagcatctattatctccaatcccaatgattgggcatagcgtgtacattcgtcttttcttatcatatactcttccagcggatagatattaggattgcaataatagataacaggggtgatgtgatgttgcatcatacattcaataatggctgatgaacaaggagcacaacaggtatgaagtaagactttatcggctcctcccggaacttcgagttggaatttctttttcatgctgtaaagttaatacatatttacgatacgagtcaatggtttatgctttattcagaatagtttttttataaaaataggagggaggatatctcctttatactgttttttataaaatcttgtttattgaactaattcactaaatgaatatgaattaactaattaatctcatcttttttactacttttgtccattcaagtttataacaactcaataatggatgaattaaattgcgggcaaggagagcaaaatgcaggcccggagaagaaaaaaagtacctcgaaaatagtgaagagaactttagttgtggctgcattggctttggcggtatatgttgtatattccgtagtttatttatttgtctcacctgatcgtaatattcagcagatctatctggttccggaagatgctgcgtttatcattcaatcatcggctccgattgaagattgggaaaagtttagtggaagtgaaacatggcaatgtctgaagaaagcgaaatctttcgaggaagtaacgaagagcgtagagaagctcgattcggttgtcaaaagcaataaggtgctattgtcgcttgtcggtgaacgggatatgcttatttcgcttcataagactcgtgccacagagtgggattttttgcttatcttggatatgcagaaaacatcgaagatggatttattgaaagaccaggttgaaaccgtattggtcatgagtggttttactgtgactaaccggatgcataatggtattaatatccttgaaatgcgcgattccgagacgagggatattttctatattgcttttgtcgataatcatttggttggttcatacacatccggacttgtcgagtcggctattgattcgcgtaataaacctaaaatcgggcttgatcagtcttttattgaaacagagaagttggtttccggtaagggacttgtcagagtctttgtcaattatgcgcgtgtacctcaatttatgtctatttatttaggtacaagaaatgagtacattgatctgtttagcaattccatgaattttgccggactttatttaaatacgaataaggagcggatggaagtgaaaggatatacattgaaaaaagattctgccgatccttatgtcactgctttgttgaattcgggaaaacataaaatgaaagcacatgagattctgtccgggcggacagctctttatacgaatataggtttcaatagtccggtgacctttgtaaaggaactggagaatgcactgtcggttcacaataaacagttgtatgattcttatcaaagttcccggaaaaagatagaagggttattcggtatatctttggaagaaaactttttgagttggatgtcaggagagtttgctattacccaatccgaaccaggtttgttaggacatgatcccgaactgattctggctatcagggctaaaagtattaaagatgcccgtaagaacatggaattcattgaaaagaagattaagcgacgtactccagttaagattaagactgctaattataaggatttcgagattaattatgtcgaaatgaaaggcttttttcgcttgttctttggaaagctatttgataaatttgagaagccatactatacttatgttgacgattatgtagtttttagtaataaagctgcttctttactttcctttgtagaagattacgagcagaagaatttattaaaaaataatccgggttttgaaaatgcactgtcatatttaaaatcaagttctactattttcttatatacagatgtgcgcaagttttattcccagttgaaaccgatgatgaatcctgctacatggaatgaaatacaatcaaacaaagacgttttgtattcatttccttactggactatgcagattataggagaggatcagtcggcttctttgcagtatgtgatggattatagcccatatcaactggaagaggttgacgttgctattgctaccgatgaagatgataaggaaatgaacgaagatgcagagaccgaaaaagagcagatgagcgaactgaaacgtttctatatcgaaaagtttgaaggaaacgttttacgggagttttatccggagggagcattgaagagtgaagcggaagtaaaagaagggaaacgccatggtcgttaccgccaatattatgaagatgggacattgaaacttcgtggaaagtatgcaaataataaaccgaagggtacatggaagtactataccgaggacggaaaatttgaacgcaaagaaaagttttagataacgtcaacaaaagttgatttaaaaattaagctcaaaaaataatcggattctttttgttttctcaaataaagctgtaattttgcacgccgtaaacgagagacaaacgccgctatagctcagttggtagagcaacgcattcgtaacgcgtaggtcgccagttcaagtctggctagcggctctcaaattagaacgctgattattatttaataatcagcgttctaatttttacaggatttcctgttcttaaaaaggaaaatcctgtgtatgtaatagatgtgaaatataaaaatgtaatctatgttgagtcgtattattgttttagttgtcgccggagtagctgtagtctatatcgttcgctttatagataactttttctcccagcgtagaagataaaactagctttcaaacattctactgcgtgccaacatgcacgcgccgacgattcctgctttatctttcaacttagaggtgataatggctgaatctttattaaccagatttagagagtacttgcgtacagctgtttttataggttgtgtgatataatcaccggttaaagataaagttccacctataattactagttccggattgaagatattgattaacccggcaatctgtttgcctagtttctgcccgatttcttctacgatttcaatgcaaagcaggtcttctttattcacggcagcaattatctcatcaagagtgatcgggttttcctcggttgtgattcgcgtagatagtatggaactttccccactttgaatacgctccaataaaatacgatgaagtgctgaaccggaagcttccgtctccagacagccttttttgccgcaatggcagattatttcattatcataagcactcatgtgtccaaattcaccggagaatccggattttccagtataaatcttaccatcaataatgattccgatacctactccccaacttacattcacaaaaatgatatctttttctcctttcacgcagccttgcatatattcaccataagtcattgcacgcgtgtcattatcaacagttactttatatcccaatttttcggataatacatctgctaacggcctttcctcgaaattgaactggctgaagctataccctgattcaggatttacacgtcccgacacattgacattaatatttaagatcttctctttattaatagtgagcttctttataaaattaagaatatgtttgcataactcattcatcccttcgattgagttctcaaacttataaggtatattcattttcaattctaccatatcgcctttgaaatttattagtccgatattgacggcgaatcttttgatgtctacccccaaaaagtaaccggattccggattgagcccatagagattgggatggcgtccaccacttgtttctaatttgccataatcattaatatatccgtcatcacacatttcaccaataaatttggtgacggtcggtacacttaaatccagctcttttgaaagatcgggaattgtagaactgccattatatatataatgtgtaataatcctctttttgacgagagcgcttttagagcccttttctatttctttcaagaattgttggttcataactatgcatatttggtaattcacacaaagataattaatttttttattaatatgtggttttggagccttgaaaattagaatatcttgtatgttatattccctatatattgtgtaatggacttatatataggataatatagttatggttgaatgcggatataataaataaaatatgatgatttataaggtaattaccccatctattaattaataatgtaggcaatagtgattttattaataaaatattttattatctattgtttatttaataaatatagctatatttgtgccgtgatattattaataaaagtctatatccttaaatgaattaagtatgagaaactattttttaggtctgtgtttattatttgctttgtgtttcacggcatgctctcattcagatgattctgttgatgtgctaattattggtggtggtgctagtggggtaactgctggtattcagtctgctcgaatgggggctgtgacattgatagtggaagaaacagaatggctgggtggaatgctcacttctgcaggtgtaagtgctgttgacggaaactataatttaccggcaggcctatttggagagtttcgcggacatttggcagattattatggtggacttgattctctaaaaaccggttgggtgagttcagtgttatttgaaccttcagttggaaataaaattttccatgaaatggttaatgcagaggaaaatctaaaagtatggcataatgctactttggtcaaattggagagagaaaatgattcttggattgctcaaattcagatgcaagatcatacgattaaaaaagtaagtgctaaaatattgattgatggtaccgagttaggggatatagcaaaaatgtgcggtgtgaagtatgatatcggtatggaaagccgtcatgatacaaaggaagatattgctccggaagagaaaaataatatagttcaggatattacatatgtagcaattttaaaagattatggcaaagatgtgactattccttgtcctgaaggatataataaggatgaatttgcttgtgcttgtgccagtcctgtttgtatcacgcctaaagagccggatcgtgtatggtctaaggaaatgatgataacttatggaaaacttcctaataataaatacatgattaattggccgatagaaggcaatgattattatgtaaacttggtcgaaatgacccgtgaggaacgtgaagaagctctgaaatatgcaaaacattatacgatgtgtttcgtctattttctgcaacatgaattaggttttaatacattgggcttagctgacgatgaatatcctactgctgacaaattaccctttattccttatcatagagagtctaggagaatccatggattagtgcgctttaatctaaatcatgtttgtgaaccgttcaaacagtcccaacctctttatcgtacttgtatcgctgtaggaaattatcctgtggatcatcatcatacccgttatcatggatatgaagaattgcctaatctttattttcatccggtaccttcatacggtttgcctttaggaactttgattccaaaagatgttgaaggattgatcgttgctgaaaaatcaatatctgtttctaatataattaatggtaccactcgtttgcaaccgatggttatgcagatcggacaagcagcgggagcattggcagcccttgcagtgaaagaaaataagagtattagcgaggtgtctgttcgtgaagtgcaaaatgcaatattggacgcgaaaggatatttattgccttatttagatgttgcaatagatcatccgatgtttaaatcgttgcaacgtgtaggttctacaggaattttgaagggtataggtaaaagtgtcgattgggctaatcaaatgtggttcagagcagatactttgttattggcgaatgaactggaaggattaggtgatgtctatccctttgtcaataagcaagttattgaaggtaataacaccatatcaattcagaaagctacagagatgataggagagattgccgaaaaagaaggtatcgaaataaaggagggtagagtagaagagatatgggatgaatttgatttgaagaattttgatatggatcgagatattctacgaagtgaaatggcaattttgattgatcagatattagatcctttcaataataaaaaagtagatattacaggacagtatattcaataggtaatgataatataagtgttaactgctgttttaattaaactaatatgaaaacattagatcgaagagattttctaaaaaaagcgacattagctggtgcatcagctttggctgtaccaactttgtttgaatcttgtacttcaaaggctagtgccagtacagtagtggtagctgatggtttggaaagtaaactcattgttcctaaaaacaatggattaaaaatcaccggaacttttttggatgagatttcacatgatattccacatcaaaactggggtgagaaagaatgggacatggattttcagcatatgaaaaatataggaattgatacggtaataatgatccgttcgggttatcgtaaatttgtaacttttccttctccttatctgctgaagaaggggtgttatatgccttctgttgatttggtagatatgtttttgcgtttggctgaaaagtacggaatgaaattctattttggactatacgattcgggcaaatactgggacacaggagatatgacttgggaggtggaagataacaaatatgtgattgatgaggtctgggaaaattatggttccaagtataaaagtttcggaggatggtatatcagtggtgaaataagtcgggcaacgaaaggtgcgattggtgctttccatacattaggaaaacaatgtaaggatatatctaatggattgccgacttttatatcgccttggattgatggaaagaaagcaataatgggaacgacgaaaatgactaaagaagatgccgtttctgtacaacaacacgaaaaagaatgggatgaaatttttgatggaattcatgatgtggtagatgcatgtgcatttcaagatggtcatattgattatgatgaattggatgcattcttttctgtcaataaaaaattagcagataagtatggtatgcaatgttggacaaatgctgaatcttttgaccgtgatatgcctattcgttttctacccattaagtttgataaacttcggctgaaactggaagctgccaaacgtgccggatatgataaggctattacttttgaattttctcattttatgagtccacagtcagcctatttgcaagctggtcatttatatgacagatataaagaatattttgaaataaaataaatgctatgaagtctacaatcaactttggttatcttatattcctttctgttgtggcagcattgggaggctttttgttcggatatgataccgcggttatatcgggaacaattgcccaggtgactcaactatttcagttagatacgttgcaacagggatggtatgtaggatgtgctttagtaggctctattgtaggtgttctttttgcaggaatcctaagtgataagttaggaagaaaacttacgatggttatttcagccgtattgttctctacatcagctttgggttgtgcactatctgccgattttactcaattggtgatctatcggataataggtggagtagggataggggttgtttccattgtttctcctctttatatatctgaagtagccgtagcacagtatagaggacgcctagtgtcattgtatcagttggctgtaacagtcggtttcttaggagcttatttagttaactatcaattattggcatgggcggagagtggtacgcaattgagtgtggattggttgaataaagtatttataactgaagtatggagaggtatgttgggtatggaaacattgccagcaatcttattcttcataatcatattctttattccggaaagtcctcgctggttaatcgtgcgtggaaaagaattgaaggctgtaaatatattagaaaaaatatataattcaattacagaagcgaaaagtcaattaaaagaaacgaaatctgtactgacctctgaaacgagatcggaatggtcgttattaatgaagcctggaatcttcaaagctgttattatcggtgtttgtattgccattttagggcaatttatgggagtgaatgcagtgctttattacggcccttctatttttgaaaatgcaggactttcaggtggcgattctcttttttaccaagttctggtaggactagtcaatactttgaccaccgttctggctcttgtcatcattgataaggtaggccgcaagaaacttgtttattacggagtttcaggaatggttgtttctctgattctcatcggcctgtacttcctcttcggagattccctgggagtatccagcctcttcctgcttatttttttcctgttctatgtattctgctgtgccgtttctatctgtgccgtggtgttcgtgctcctctctgagatgtatcccaccaaggttcgcggactggccatgtcgatagcaggattcgctctgtggatcggaacgtacctgatcggacagttaaccccctggatgctccagaaccttacccccgccggaacattcttcctgttcgccctcatgtgcgtgccgtatatgctgattgtctggaaactcgtgccggagactaccgggaagtcgctggaagagattgaaagatattggacccgttcggaatagtaaaacaaaaagaccttaataacttaataataaaagatgtatggattttaagaaactggcaaatcaatacaaggatgaactcttggataatgttcttcctttctggcttgaaaactcacaagatcatgaatatggaggctacttcacctgtttggatcgtgaaggaagagttttcgatacagataaatttatctggctgcaaggccgcgaagtgtggatgttctctatgctttacaataaagtggaaaaacgtaaggaatggctggattgtgccgttcaaggtggtgagtttttaaaaaaatatggacatgatggagactataactggtatttttcccttgaccgtttgggtagaccattggtagaaccatacaatatcttttcatatacattcgctgccatggctttcgggcaattaagccttgcaaccggtaatcaggaatatgctgacattgccaagaaaaccttcgatattatcctttccaaagtagataatccgaaaggtaaatggaataaacttcatccgggcactcgtaatctaaaaaattttgccctgccgatgatactatgcaatcttgctatggaaattgagcatattttaggcaaggactatttggaacaagcgatggatacttgtattcatgaagttatgtctgtcttctatcgtcccgaacttggtggtatcattgttgagaatgtagatgtgaatggtaatctgatagattgctttgaaggacggcagattacccctggccatgcgattgaagccatgtggtttataatggatttagggaaacgcctaaaccgtccggaattaatcgaaaaggctaagaatatcactcttacaatgcttgaatatggttgggataaagaatatggaggtatctactattttatggatcgtaacggttgtcctccccaacaactggaatgggaccagaaactctggtgggtgcatattgaaacactcatatctcttctgaagagttatcaattgaccggagataaccaatgtctggaatggtttgaaaaagtacacgattatacatggacccattttaaagataaagagcatcccgaatggtatggatacttaaatcggagaggtgaagtgctactaccactcaaaggaggaaaatggaaaggatgtttccatgtaccaagagggttataccaatgctggaaagtattggaacagctataaacaataatggatatgttaaccaatctatattaatccttaattccgcaacactattacaaatataactttttaagtacctgagcaacaaaaagttgctcaggaatttgccatgtcagatttttcacctatcttagtgttgcaaatcaaaatatgtatcaaacccgacagacatggcaaaggtagcaattaaatccgagaaactcactccttttggaggaatattttcaataatggagcaatttgactccagactctcatctgtaatcgactcaaccctcggtatgagatgcaggctgtatggttatcaatacagcgaaatcatccgttcgcttatgagcgtttatttttgtggcggctcatgcatcgaggatgtcaccactcatctgatgtaccacctttcgcttcatccgacacttcgcacatgcagtgccgacacgattcttagagccataaaggaactgacccaggataacatttcctacacatccgacactggcaagacctacgacttcaacacggcagacaagctgaatacactgctcctcaattgcctattgtccacagggcagctgaaagagggcgaggggtatgacgttgacttcgaccaccagttcatagaggctgagaagtttgatgcgaagcctacatacaagaagttccttggttatcgccctggcgtggcggttattggcaacttgattgtcggcattgagaacagcgacggcaacacaaatgtccgtttccaccagaaggacacgctgaagaggttctttgaaaggtttgaacaaaacaagcttattatcaaccgtttcagagctgattgcggctcgtgttctgaagagatagtggaagagattgctaaacactgcaagaccttctatatccgtgctaaccgatgcagttcgctctacaatgacatctttgccctcagaggttggaagaaagtggaattgggcggcattgagtttgagctggcctccattctcatcgagaaatggaaagggaaggcataccgtcttgtgattcaaagacagaagcggatagacggcgaactcgacctgtgggaaggagaatacacctaccgctgcatccttacaaatgactacgagtcttccgagaaagagattgtcgaattctataacctccgtggagggaaggaacgcatcttcgatgatatgaataacggattcggctggaacaggcttccaaaatcctttatgggagaaaacacggtgtttcttctgcttatggcactcatacgcaacttctataaattcatcatggcgaggcttgacgtgaagaggttcggactcaaagcaacaagccgcatcaagacgtttgtctttaagttcatctctgtgccagccaaatgggtcaggacatcaaggaagtatgtgctgaatatctattcatgcaacaatgcttatgccaatgtgttccagaatgactttggataacaccgacaacttatagtcgtgattttgcgtattgcctcaagtcgcatggtggggtaaggggcatttatatgtctttatggtgacattcgatgcactgtgccccctttttactaacgatgcagattcttttcgcttctgtatcatattaggcgcgtagttgcggatttgaggttaataatctaaaaattaattctatgacagagtttaactcaaaaatcaagaagaactctcgtatattgaaaatatttatgttttcaatctgcgcgctatttgcatgtgctatcagtagtcatgcacagagtttagtgaaaggaactgttactgatggtataggagaaccgctaccaggagtaagtgttgtcgtaaaaggaactactaatggcactattacagatgtaaatggaaaatatagcattcaggccaccgcaaaagacattttatcattctcatatgttggaatgtcagatcaggaaataaaggtagcaggtcagacgaccattaatgtggttatgaaagatgatgtggcagctttggatgaagtgattgtggtaggatatggtactgccaagaagcaatctttaaccggagccgtatctgcggtgaaaggcgacgaactgctgaaagcaccggcaaccaatgtgtcgagtcttttaggtggacgtttgccaggtatttcatctgttcaagtatctggtgaacccggagacgatcaggctacattacgagttcgtggctctatttataatgttacttatatagtagacggaatgcctcgttctattaatgatattgaccctaatgatatcgaaagtgtatctgttttgaaagatggagcttctgcagctgtttatggattaaaaggagccggtggtgttattattataactacaaaaaaaggtcaggaaggaaaatccaaaatcacttataatggttcaataggagcatctatgaatgcaaacttcccgcagtttatgaatggacctcaatttgcatattattataatatggctgacatgatggataaaatggctaatggaagcatttcaaacattagtcaatataatcccgtttttacaaaggcgaatgtggaagctatgttgaatggtgatcctactgacggatgggataatgttaactatattgataaagtatttggaactggtatcaaccagaaacataatgtaaccatacaaggaggcagtgataagatgcgttactttgcttctgtgggttatttaggtcaaaaaggtaacattgacaatttctcttacaagagatacaatttaagaactaatcttgagactcaactggctaagaacttccagttaagtttaggtattgcaggaaatgtcggtaaacgtgaaactccgggatatgcttcaggcggtacggattctaattccgaattgggtgaacaaggttggttgtcagtagctcatcagactataatgatgcatccctatttgccggaaacatatgacggactttatactgctactacacagaataacacaagtctgcccaacagtccgttggctgctatttatgaatccggatacaagcataccaatagctttgatttgcagaccaacatctcattgcaatacaatgtgccttgggttaaaggtttgagtgtaaaagtaaccggagcttatgactatacaacttctcataataagaatttgaatacgccttactccacatatatacataaaatgccgacttcgacagcagattggacttggtctaaagcagacgatcctcgcggcacagcaaatggaataaatttaggtgaaggacagtatagttctcatcaaatggtaggccaaggaagtataaactatgcaagctccttcggaaaacataatgtagaagcaatggtattggcagaaatccgggattataaagaaaacagtttctccggctataataagaacatgagtttctctgaactaccggaattgagctttggacaaccggcagactctccaatctcgggatacagtgatgcaaaccgtagtattggttatgtttttcgtttgaaatatgactatgacaataagtatttggcagagtttacaggtcgatatgatggttcttacaaatttgccggcaatgttagtgggaaacgttgggcattcttcccgtcagcgtcagtagcgtggagaatatctaaagaagattttatgtctagtctgacatttctggatgatatgaagatacgtgcatctgtcggtttattaggaaacgatgcagtgagtccgtatgctttccttagtacttacaatttgatggatggtaacaaaaatgcataccagacaattctgaatggaaaagtaatgcaagcattacgcgcctctgtaattgccaatcctactctaacttgggagaacaccttaacctacaatgcaggatttgactttacgatgtggaatggtctgttgggaatggagtttgacgcattctataattatacctatgatattttgacagcaatgggaggcgattacccgccatctatgggaggatattattatacttatgccaactataataaggtggatagcaaaggcgttgaagtaacggtgagtcatcgtaataaattaaacttggcaggtaagccattctcctatggcgcaagcttcaatctgacatttgcaagaaaccgttatctccgttatccggatagtccgaacacagtagagtggagaaaacgcacaggacgtagtgttgatgcttctgttgtgtgggttgcagatggcttattccgttcggaagaagaaatagacaattcagcctggtatggcactcgtcctaatgtcggtgatatcaaatacagagatttaaatggtgatggtaaaatagacgaagatgacagaacacgtgttggacgtggcaatcgtcccgaattaacttacggtttgaacctgaattgtgcttggaatggattcgatttaagtgcacaatttactggaggtgcactgtttgatgtatcgttgacaggaacttattacaatggatatgacgataatacagtctggacacaggcatttaaagaaggagccaactcaccactatatctggttcagaatgcatatacagtagaaaatccgaatggaacattcccacgacttacactgggtaatcaaggacacggaggagataatggattagcttccactttctggttgcgtaacggtagataccttcgtctcaaatccgcacaattgggttacacattccccaagagatggatgagtcctgtcggtattcagaatcttagaatttatgtagaaggttctaatttattcacgatttccggtcttcctgatggaatcgatcctgaatctccgggagtaaataacggatactatcctcaacaacgcaccattatgggcggtataactttgactttctaaacctttaaaagttctattatgaaaacaaaagtattaagtatcatattgttgggagcctctttagggcttggctcatgtagtgattatctggacatgactccaacagacagagcatcagataaacttgtatggagtaaactcgactatgcagaacaggcagtcaacgatttctatcgctatatagattatttaggagtctacagggatggacaatgtttggcaggaatgacagaagctctgacagatcagcttaaatatggttcctacaattatatggctaaatgtcagatacctagtgaaattgcttatggaggttctgttctcacagtgaattatgttagtacttaccttggcaactgggggacgatgtacgaatatgtgcgccgtgtcaatgaaggtatcaacaaattaaagaaatatgcttcatttggtcaggctgatgaagaacgcttggaagctgaaatgcgtttcttcagagggtatctctatacagatttattaaagcgttataaagaagtgattatatacgatgagaatctggataatataaaaaaggatatgccagttagttcggaagccgacggatggaattttgtatataatgatctaaaatatgccggtgaacatttgcctgttgataaaactcctaacggacgtttaactagcggagctgcttatgcaatgttatcgagagctatgttgtatgcggaaagatgggatgacgctcgtatcgcagctgaaaaggtgatgggaatgggctatgaattagaagcaaaagaagactattcaaatgcctttaaagcaggaagcaaagaagccattctacaatattgttatgataagagttccactgtgactcatgactttgatggatatatggttcctggaggtgataaagcgctcgacggcaattccatgactggaggattcggtaccccgacacaagaaatggttgaatcgtatgaatatgcagatggtagtggcttccccgattggagtgcatggcatactgctgaaggtactacaacgattcctccttatgccaaattggaaccacgttttaaagctaccattctctataatggagcaacatggaaaggcagaccgatagaatctttcgtaaacggtactgatggttgggctgcatggaaaacagatgccaaaccggaaggacgttctactaccgggtattatttacgtaaactggtagatgaagctcataattttacttccatacaagccagtacacagccatggaccgaaattcgttacgcagaggtattactgaatcatgcagaagcatgttatcatctgaatggctatacggataaggcaaataaagacataaaagatattcgtaacagagtgggattgtcttacacagacaaaagtggggatgatttaatgaaagccatccgtcaggaacgcaaagtagaacttgcttatgaaggacattattattgggacatgcgtcgttggaaattatctgcgacagcatttaccggtattcgtcttcatggaatgaaaatagagaaaaatgcaaatgggtctttcacttacatttatacagaatgtgatgataaagatcgtaatttcccgactaagatgtatcgtttcccaatgccacaggcagagttggacaataacggtgcggtaactcaatatgcagaatggcaataaatctaaaatgaaaacattatgaaaaagaatatactatatctattattagggattttggctctcacgagttcttgccaggatccggaatatgtgcttcctactgcggacagacagggaatcacgagcttgactgcactctttacttctgggccatacgtggataaagaggctgtggtatatactattgcagatgcttctgtagataagtatgtaattcctatgccatggtattatccggaaaatagtgataatgaaacttcagaatatatgaaagcgatgaggattcaggcaaagttggcaccaaactgtactattgaaccggttctttcaattctcgatctgactaaagagaattatttcacttatacagacgctcaaggatataagaaacaaatctgcatcacaggcgaaagagttaagtctactaagtgtcagttattaagtttctcaataccgtctgaagacattacaggcattattgatgaagaccacaaaactgtatctttaatctctgcggaagatttatcttcttgcttggcagattattcactgtcggctcatgcgaccatgtcaccggatcctaaaacagagcctcttaattttaattcacctgttgagcttacagtgattgctcacgatggagtgacaaagcaaacttatactattcaaaaagcagtaccggataagattccttacggatatagaaaaggtagtgagacagaattatttaaattggatatgggagttatcggcttaccttggactggagcaaatgcaccttctttagctgtttccggaaataatctggtagtttgcttgggtgatggtaccacaactcctgcatattacaatgcatctacgggaaataagattggtaatgtaactttgggtagtgtgagtgttgcatctttaggatgtatgacaagtgatagtaggggaaatatattattagcaacgaaggctactaatggcaagtctttctcaatctataagacttcttctgttacgactgctccaactttattgactacttatactaataatacagggttagatatgggtacgaaagtgtctgttcaaggagatattaatactaatgcctctattattgctacttgtgacggaacagccagttcaggttccaataagtttgttcgttggattataacagacggtgtattgggaagtcctcaagtagtaacagtgaatggtgtaggtaattggggagctcccgcatcaaacactaaagttgtgactaaaggaactactgctcaaagtgattatttcttgtcatactatgattctaacattctttattgggtgaatggaacaaataataatgcaagtaaatctctggaagactccgacaatggtaattcttgggcaatgaataacaactgtctggatacaagaagctttaataatgcacaatatcttgtattggtatgtacagctcatttcccgcaatggggtggaactccatgcttatatatgtatgatgtaacgtcagacggatcattcactggtacaatatctacttcagatgctctgtcattcaatccttcactttcctcatacaattcatccgatggtgtagctgcaacaggtgatgtattgcttgctccgacaacagatggatataagctccgtgcttactacgtggataacaactgtaaggttatcggaggatatgagtttgattgtatcgacaaataattaattgatctctttatctcatatatgatgagaaaatacccattcatcatatatgagataaagaaatctgtaaatcatttaaaggagtagctatatgtcaacaaagaaaaaaatgttatggttattatcattactgccttttttcatagcatgtggtgatgataacactgatatcccggattggccatgggcggagccggagactccaactgaacctgttgaagccaatcctgatattgtaaatttaggctgggccaatgtgaaaagcacttatggaaccttgcctgaacatatcaacgtatataaatcaccagaaacactggaaggcaaaaaagcgatagcttatattgcggtaggtgatatgagtaaggcagcatttggtgtattaggagaaaagactggattgaaaaagccaaaagaattttatgaagagaacaactccacaattgtaatcaatggaggtttcttctatgaggggtcattaagcctaatatggcgtaacggtgaaatggtgtgtaagaacaatgatgtaacagcagaagattggactaacggtccattctggtatcctgtattagctgcattctgtgaaatgaatgatggctcattcaaatcaatgtggacttacacaacactatccaatgttacttattggtattcggagccctcaccggtaaaatcagaaacaactcctaatgaaaattttccgtctacaggaactgtcttaaatgctaaaacaggaataggcggtggccccgtacttctgttggatggaaacataaagaatacatacgaagaagaagttttatcagatattggcgccacggtgaacagacctcgttcggctattggtatcaccaatgataagaaaatgattctttttgtgtgtgaaggagatggaatgacaacgggagttgccggtatgaccaccgaaaatgtagctaatatcatgaaaacactgggatgtacggatgctatcaatttggatggcggtggttccagttgcatgttagtcaatgggcaagagactatcaagacaagtgactccagcggagacgaaagatccgtagcatcagtagtcactcttaaataaaaaatgtactgcggatatatcaggcagtatatacctaataaaacaagtatgatatgagaaaatttctaaaaatactaatactgactttcttgggagcagttacaataacctcctgtagtgatgattctgatggaattcccggatggccgtggaacgataattcgacagaaaagccggacgagccggatgttgcagaagctaagccacgatatatttggattgatgcggctgctaattttcctgactatgccaatagtaaggaaaacatagccaaagatatggaaaagataaaagcggcaggattcactgatattattgtcgatgtacgtcccactacaggagatgtattattcaatactaatgttgtagatcaggtgaaacgtatggatgtatggggtaattccggatatagttattatgaaaggacggaaacttgggattacttacaggcatttattgatgaggctcgtatacaaggattaaaagtgaatgcttctatcaatacatttgtaggaggctatttatgtccgtataatttgggacatgatggagtcttgttccgtgatgaatcaaaaaaaggatgggcaagtgtagctaatctgactgatgggctaacgaatacaatggatttgttggatgatgaaaccgattatggagcgaaattcttcaatcccgctaatgatgatgtacaaaactttgttttacagttgttggccgacttggctaaatatgatttggatggcatcatattggatcgttgtcgttatgatgactatggcttagaaagcgatttttcagatatttccaaacagaagttcgaagaatacatcggtgaaactatagcaaacttcccggcagatattatggcacccggtacggatgaaataccttctgaccagcctgtttattttaagaagtggttggaattcagagcgaaagttattcatgatttcatagtaaaggcacgcgagaaagttaaatctgtcaataacaatatcaagtttggagtttatgttggtgcctggtattcaacgtactatacatcaggcgtgaactgggccagtcctaaatacaacacctccgcttattatccgaaatgggctacttccgattataagaattatggatatgcggaccatttggactatatctttttgggtgcttatgcttccgtgaacaatatatatggaagtggcgaatggaccatggaaggtttttgtaagaatggacgtgaactgttacaaggagatgtaccttttgcaggcggaccagatatcggtaacagtaccggatggactgacggaggacaatctgcaaaaattccggatgctattgatgcttgtatcagtaatagtgacggcttctttgccttcgacctttgccacgttaagaaatacgactattggaacgcttttaaaacaggctttgataaatatctggaatctatcgaagaatgaggtttgaactaaccaactaattatgaaaatatatttattacaattctttttattaataggtctgggcttgaatttacaagcccagattccttctaaccctattcgcgggaaagtaacctgtaatgggacaggagtcccgggggtagtagtgaccgacggaatagactgtgtgttgactgaccaacaaggccaatatactctcccccctaataggaatgtgcgtttcatttatttatccactccttccggatatttaccgaaaacagaacaaacaatacctttattctatcagaagctgaatccggccaagcaagatatttacgacttcgaattggtaagaaatccgcaaaatgagatcaatcatttgtttttggtgcaggcagatgcgcaggttacttccgaagatgacgtaaaggcttatgctaaatatctgcaagatatgaaagaatatattcgtccgtatatgggcaaaaaagaagtattcggcatagattgtggggatatcgtaggagatactccttctttatatccttcctatatagatacggtatcatcattagagattcccatctatcgggcaattggtaatcacgacatgacgtatggagggcgtacttttgaatattcttatcgcactttcgaaagttatttcggtcctatctactattcattaaataaaggtaatgctcattatatcgtgcttgacaattgcttttatgtcaaccgtgattatcaatatataggttacattgatgaacgtactttccaatggctggagaaagacctctcttatgtgcccaaagacaaacttgtctttgtagtgatgcatattccttccagtcttcagaagaagctaagatataacacgctagatcaagatgaaacggtcaatacagctgcactatataaattattggaaggttataatgcccacatcatttccggacatacacattttaatgtaaacgtatgttttaatgactcattaatggaacataacacagctgccgtatgcggtacttggtggcgtgcagatattaatgtggatggtactccgaggggatatggggtatatgaagtagacgggaaccaagtgaaatggctatataaaagtgcaggctacccgaaagagcatcaattacatgtatatcaggccggatcatctgacgagtacccttccgatattattgctaacgtatggaactgggatgaacagtggaaagtggaatggtatgaaaacggaaagcgaatgggagaaatgcaacgctacaaaggatatgatcctgcagccaaagcaatctgttctgacaaagaaaaggtgaaatatgaatggatttccccagttcttaccgaacatctatttcatgctactccccgtaataaaaatgctaaaatagaagtgaaagtaacagatcgcttcggcaatgtgtatactgaagctgtcgaaaacaaataagaatcatatgttgaaagccaaatattttatattattgatatgcttctcctttctcctgaaaacagaagcgaaagtaacccttacttccatttggggggataatatggtgttacagcaacaatcggaagttactttttccggaacagcgacttcgggaaaacgtgtgcaggctaccgcttcatggaataataaaaaaatccaaacgaatgttgatgcaaaaggtgaatggaaactttctctccaaacaccggtagctggaggtccgtatagtattacgttctcggatggagaggacctcacattgcagaatattttaataggagaagtctggttctgttccggacagtcgaatatggaaatgccagtgaaaggattccgtggacagcctgtgtttggttcccagccatacattgtatctgctaatcccaaacgtccactgcgtctctatactgtaaaaaatgcctggagtaccattccacaggaagctggggtggacggagaatggaaagaagcctctccggaagatgttgctgatttcagtgcaactgcctatttctttggcaatcagttacagcaatctttggatgttcctgtcggtctgatacattgttcctggagcatgtcaaaaatagaggcttggatgaataaagagactttatcgggctttccggaaatagcattgcctgatgtaatacagagagagttcgggtggacggcagggactcctacattattgtggaatgcaatggtgaatccatggaaaggatttcctgttaaaggagtgatttggtatcaaggtgaagcaaacacacccgatcccggattatataagagattatttcctgcaatggtttctcaatggagaacattcttcaacaatccccaaatgccattttattacgtacagattgcaccatggaaatcggaaggcaatgataaactggattgggcttggttccgccagtgtcagttggagttgatgtcagctgttccaaatgttggaatggtgaccacaggtgatgccgggagtgaaaactttattcattcgccctataagataaaggtcggtgaacgactggcttattgggcattggcaaaaacgtatcatcgtaaaggtattcaatattccggtcctatatacaaatcccaccgagtaaaagggaatgtagtagaaatagactttgaacatggtgaagaaggattgatcccggaaaatcaaaacgtgaaaggatttgaaatagtggggacggatggtatattccgaccggccaaagcggaaattatcaatggttcttctactgtagaggtctggaatgattcgatcaatgcccccatagaggtacgttattgtttccggaattatatgttgggagaattatgcaataatgcggctattcctgcttctcctttccggattgtaatcaaaaagaaacctgcgttaatgtggttcgatgccgaagctaacttcgaacgtttcagccataaagactcgattgactattatttggagaaaatcaaatcagtaggtttcactcatgcaatagtggatatacggcccattacgggagaagtactttatcaaagtcagtttgctccacaaatgaaagagtggaaaggcgcaaaggccgggaattttgattatttgcaatacttcattaaaaaagggcacgaattgggtcttgagattcatgcttcattaaatgtattctgtgccggacacaattatttcgatcgtggaatggtatatagtggacatccggactgggcatccatggtatatactcccgataaaggcattattccgattacggaagaaaaacaaaaatatggtgctatgattaatcctctgaatgaggagtatcgtgcgcatattctaaatgtactgaaagaagtagtgaccaaataccctgatttggatggtttgatgctcgaccgcgtacgctatgatggtataacagccgacttctcaccgctttcacgcgaaaagtttgaagcgtatataggtaagaaagtggcgaagttccccgaagatatttttgtttggaagaagaatacggatgggaagtttatcacacaaccgggaaagtatttccagaaatggatggaatggagaacgaaaaacattactgattttatggcattggcacgtaaggaagtgaaagccgccaatccaaaagtttctttcggcacatataccggagcttggtatccgtcttactatgaagtgggagttaatttcgccagcaaaaagtatgatccggctaaagacttcagttgggccactcccgaatataaaaattatggatacgcggaactgatcgatttgtatgcaaccggaaattactatacagacataacgatagaggaatacaagaaaacgaaccgcaacatctggaacgagacagattcgcaggctcaagccggtacatggtactgtgtagaaggttcctgtcagcacttgcgtcagattcttaaagacaacaagtttatgggcggcatcttggtggatcagttctatgataatccggggaaattatccgaaacaatagagatgaaccttcgtcgatcggatggactaatggtattcgatatagtacacatcatccaaaagaatctttggaaagaagtagaaaaaggaatgcgcgaggggggagctttatgaacaacagagctttagctttagatgccttacggggatatgcaattattacgatggtgctttcggctaccatcgtaacgcatgttcttcccggttggatgagtcatgctcaaacgcctccgccagatcatgtgtttaatcctctgttgcccggtattacttgggtagatcttgtgtttccttttttcctgttcgctatgggagccgcgtttcctttttccataaggaagcgtgctgaaaaaggtgattcaaaattaaaacttgtctatgaagctgtcaaacgggggattcagttgactttctttgctattttcatccagcatttttatccgtatatgttaagttctccgcaggatatcagagcatggctgctggctatactctgttttgctgttctatttcccatgttcatgcgcattcctttgaaaatgccggattgggtacatatttcaataaaagtgggagcttacattgtcgctgccattatgttggctaccacttcttatgcggatgggaaaacattcagcttattctccagcaacattatcattttgctgttggctaatatggctattttcggttctatcctttacattttcacaatgcataatcgttggatgcgtttaggaattctgatattgctgatggctatgatagtagggagtacggttgacggttcgtggacacagagtgtatttaattatactcctctgccgtggatgtatcggtttgattatttgaaatacttatttatcgttattcccggcagtatagccggggagtatttagcggagtggatgaaagcatatcaaaaagagacggatgattatgctacatctccttatcgtaaaatgagtattatgttgatgatattatccgttgttatcatcattagcaatctttacggtctatacactcgttatttggttgtcaaccttgtatttactgttttattgttattagctggtaagtgtatatttccacgtaaagtggatggaatagctttattatggagaaagttgtttaacgcaggggcatatttacttcttctgggtttgtgctttgagcctttccaggatggtattaaaaaagatccaactacttttagttatttctttgtcacttccggattggcttttctagctcttttatttctaagtatcgtttgtgattatttccggtgtgtgaaaagtactcgttttttggtgatgtccggtcagaatccgatgatagcttatgtggtcggcgatttgttgattatgccattggctaatatacttggaattgcttcattattatcttattttcaacaaaatgcctggttgggatttcttcagggagcaatccttacttctttagctgttttagtaactatgttcttcacaaaaatcaagtggttttggagaacataaatatcaatatgagtagtttatatcaaattgatcgacaaactgtcgttttttctttgattttattatttctcactttttgtaaatgagagaaagtagaaagagaaaacaataaaatacggtatttatatacataattacgaataaaagaacggtcatttgcatataaattaccgtattattatagaaaaacacacgcttgattgtaatgaaacgtacggttagttttaaagaaacacacggttggttttaaagaaacgtcacgtacatttaaaaggaagcatattctgctcgtaaaaacatgatttattgatttattagaagtgctttgatgaatttgttttattaaacaaaaagcacgaaaagattgataaatatattcactatgtaatgcatgatattaaatagaaatgattgtgctctataaaggaaggatttctttaatttctgaataatactaatgcttaatctacgcgattcttttctatgtccagttaacaagctgaataaattcaattataacatcattcaaataccaaaatgatattttaccattttgatatttggagatttgtttttaccgatataacatataaaaagccatctattaggagtattaaaaatagtgacgctatgtcaataggatagcgttgctataagcttcatatagtgacgctataccgagccgatagcgtcactattttatttgattgctttcttaatgattggacaaactaaatctgcatatctcatcatgcctaaatctgtgaaatgaataccatcaattgtggcttctccatcttctcccagcatattctttgaagagattaaaatgatattcttctcatttttcttttttagccgattgaatatctcttttaatgtgtcattctttctttgcacttctttagctattctctcatcataaagtgtatgagtgaaaataggatcttctataaaaataactggcgtatccggatgtttactacgaatgatacgatagaatgtctccatgcgttctttcatctgttctacagaagcattaggcacaaagtccaaaacaaaaacactggcatctacctcggctatcactttggcaacttctaaatctaaaaatgcatttccactgaatcccaaattgatacattcacgatttaatcttcttgatataatgtttgtatgtgccattccgggacgtgaagcacaacctccttgaagaatactggttccataaaatacaaccggcttctggcgaatcggataatcaattaaaggctgatcgatagtagctaacgaatcaatccctatagatagggaaaccaaaccgtcatagagaggaagataaagcatatattctctctcttccggttgcatgttagcaatgattgttgcttgatttgtttttccattcggacgggcactgtttacaaaacgccactccccattcttctgaagacaataaaggtctagaccttttgcaccagtgtcagtcatgtgattcatgtgaaaattgatgagtgtttcccattttgcggctatcgtggtagaattgctacggaaacgtattgccattccggcagaattacgacttaaattccataatggagcacgggagatatttttcaatgaatccggaagtctttcatatcgtgttccggtggcttcggtggcttttcctaatagagggaactttgatgcatcatgatatactagttgggcatatatatgacacatcaaaagaagcattataaaaaaacaaattcttcttttcatattttgaatattattgtttcaagttctccaaaagtattttattcgggtaaagaacatcgttaccaatactgataatgccgttaatactacccctcgtaaaaatcccatccatgcattctcattgaaataagcaagcaatgatgcaattcctaataaattgattacaggcataatcaatagatctcctactacataggccatcatgggattttgtccgggcattacaagaaaacgggtactctttacacaacgaaaataatcacatatcacatttaaaagcaacaaagccataaatgccagacctgaagtgagaaataaataactcaaagtggcgggatctttttttatacctccctgaaaaggttcaaagcataatcccaaaacaactaagaaagctccggctgtaaaaagttctctccaaagctttataaatcctgtgccctttctcaataaaaagactccacttatcaataacggaatatttattatcaggttcaagactatacaatgcgtataaagtcccgccaaatttacaataattatagctaatgtcaaaagaatcattattatagctttccatttatcggtagattcaacacacgaatcattgtgttgcttcagccagcccatcaaatattctcccgcaatgcttcccggaatcacaataaagagatattgtaaatattcaaaatggaaaacccaaggcagaggcgtgtaggtgtatactgcttgtgtccaggagttttcgacttgtccgcttaatagcaaggccatcaatatcagcaatatacctattcgtgcccggagattttgcatggtgaaaatatatatgaccgaaccgaaaacagccatatttgccaacaataatatgataatattgctgaatgatacatcaaaagttctttcatttgcatattgagttgtcagtaacaagacaatggctattacataggccgttaccttgataactgtacgcatccaatctggcattttcagagggatgcgaatgaacataggaaatagtataataaaacaaagaatggacaataaccaggcacgcacgtcttgtggattactcagaacatgcggataaaaatgttgaataaaaatagcaaagaaagtcaattgcacacctcgcttgatagcttcatataccaatcgtaacttagtatcccctttctcaaatctttttttgatcgaaaaagggaaagcagcacccattgcaaacagaaagaatggaaaaacaagatccacccaggtgattcccgataaactggcgtcgaaagctctgtccggaggaggagtttgtgcgtgatacatccatccgggtagagaattccatgcaacagttgccgaaagcaccatcgtgatgatagcataacctcgtagggcatctaaagcataagcgcgtttattcatatatctatggattgattgtttgaatatattctttgccaaaacggtcggttactttaaccgttacatgagcatctttatttttaggagttgcccgaaacatatgttgggtaggtcttggggtaatccatgtatataccatcttttcccggtccgaacatactactgatgcgaacggatctaaacctgtatatcgtgtcatgtttcccatcaactgaccgtcttccagccattccactttccacagtttatcccagttccatacattagcaataatatctgacggatgctccttagaagctcctacaggataagaacgaaattgatgttcttttggatatccggaacttttgtaataccattttacatcgttgtcatttacttcatatacgccataaccacgtggagtaccatccagacaaatatccgctttccaccacgtaccacaaactgcagccgtattatgttccatcagattgtcatcgaatacgatattaagattgtaatgagtatgtcctgtgataagatgtgctttgtagggtttcaacatctgatgcagtgcacctgcattgaccatctgattaccaatcatatcatagttatacaaaaaagcttcttgtttttctgtttggcgggaagggatatgcataataaagaatacgagtgaccctttcggtacgtatgataaatccttatcaagccatgcaaatgttttctcatccagataacccatatagaaataatcacgtccgataaagaaattattgtctactacaatataatgggcgtttcccttattaaaagaatagtaagaagggccaaaagtatcttcaaaagtcttgtaggaagtttcatgcgtgcgaccgtcataattcatatcatgattgccaactacacgatagataggtatatccagttgatcggctcttttcaaataatcgggatataattcttgatgatcgcctacaatgtctccacaatcaattccaaaaacttctgttgttgcataagaagagagaagttgtttgcaatcgtcgactacatgttgataaatagccagttcgtctctggaagtaacctgtatatcagattgagctacaaaaacatgggaaacatcatctttgggattcttcttcagattaaaattatagttttgctttttagaataatcaataggtagatagaaagaagggatagttcctttccggtctgtcagatagcctgaaggagtacaaatatatacaaaacgactgtctcccaaagtggggatactatatttccctgaagcgtcggtctgcacacatatatggccgtcggtaaccattactccccccattcctttaccttcgcaggtgactttacctttgataatgttgatagaggcttccgcctgaactgaaaggttcaggcagaaacacattaaaagaaataaaaacaagtgtagtttattcgttctcatattgaggtatactttataattttatcgaatgatttcttttgcgtattttttatagatttggcgggctagttttattccgtcaccgccttcgttgtagctgattctgttactaggatttacccattcgttttcataaatccgtgattgattaaagaattcttcttcatcaaaatttttcttcttttcagcagcctcgattactttatttataaaacgatcccaccgaacagaataatattgattggttagacctgcccatgatcgattagcatagtcggtcaggtgatagctatctccccaaatggtaatcagagaacgggcattcatttcataatagtttttagaagcggtatcatgtcccatatcacgagcatcagtgatccatttatgcagtgagaaagttggatgacagctaacgagtttatcaaggtcagcaagaatctctctcatcttattcccccggtttttcatcatcggtatatctcccgcttcatatgcaagggtgaactcatcacggactacattaaaataattccctaaaacttgtcgtccaatattgaccagatcaaactcataactatcccgttgacagtcttttacagataatagcaatctccatgcttcaactaaatcttttggttgatattcaatcgttggtttggtagtccaatgtccatttcctttcaaacaggggcgcgcattggtgagtgtgccttgtcccacttgtgctggttggacgtacactttatttgctagtatttcccatgcttttctcgcttcaggagatatcttgccgattcgtctgtctgccagtttaaagaaccattctttatctgtctgacctccattccatgctttgtcaagaacaaattcatacataaactgattcaggtctatgccttcgagagtggaacctactcctttaagattactgccgccattctttaaagcatctgccaatcgttcgctcaccaaatttaccggacctgacagaaaggaattgccaccaaaattacccagataacaccaaagataaggttgaccgaaataactgtctgtctgtttccagatttctgtatattcacagaaatagtctaatagaatcaacctgtcttgaggcacagaacgaagataggatttgatacgtggagtggtccaatgcttgatgtcagcataaaacagccatgtcatctgcaaccataccgcttcaggatctacagcagctacagattcatagatatgcttagccatcattcccaaagaatcggcatcccatgaaggaggatctatttcattgaacggatcgatgccatagatatggtttgtaccatataaacgagtctgttcggtaagatattctttttgtatgatcgcatacaaagaatccatgggattcaggaaagtacaacgatattgatcggcaaaacctccccattcgcttactctggttgtttttatattgggataaacccgtttcaatgctgtcggtacatgcccggcaaaagccggcaatacaggtcgcatattaaattcacgttcacgggcaacaatctgttcctgcaacgctgcctgacttgacaaccactctttaggtaaaggactttgccagccatccaagttacacattcgatgccatggaagatgtgcaggacctgtaaagtatccccgtatttcttcatctgtcaatcccagtttactccagactttataccagatagcttcctgaccggtaatagcaagaggcatattgattccatttaaagccatccagtcgataaaatgttcccaatcactccatttccaccaagtcattgaatacccgaacgtacaatagtttagaaagaaacgggttgggacatttgccttaatagtgacttctgttgatatgaaagggagagtattaggtaattctatcggatcatccttataccatgaaatagtggtcagacagtagtttttcaaataatgattcaaacctactgccatagagttagcgttatttccggaaataataattttattcccttcatttttgatggtaaaagtgtctgcagaagtattattcaacagacggaaatcaaaagatgaagcatgttgaggaaacaaccgttgtgtcattttacgcatggtagtgatattagcatcttccgcacgtatttggcagacaacaactagaaaaaggagtatacttagtattttcttcataatcatattattgtttgataaaacgaatagcacatccaccgcttgttgccagtttgacatgaagcgtgtcagaagctgttactattttctctccatacttgaaagaagtcggattcgttttccattccgcatcgtcaccgtcagcatatatttgcgcagtatactttgagtccgcatccaaaaagctcaaaggaacatctagctctcttgcattttcgtctgtgatgcagcctacataccaatcgctggtgttacggtctttccgcgcaaacacggaataatcaccaattttggcatctaccacataagttttatcccagtcggtaggtacatctttaatgaaatcgaacgctttgatgcctttgtagttttctggtaaatccgaggccatttgtaaggggctgtagatcacgacaaatagcgctaattgcttgcaaagtgtagtattgacacgagtccccggatatgcttcgttagtaaagttgaaagttccgaatgtgaagtccatggggccggctagtcctctggtaaaaggaataacagttgtatgttccggcggatttcctccatcgggagaccatgcattgtgttcctgtccgcgcacgccttcctgggtcataagattaggccatgtgcgctcaataccggtaggcataacaggctcgtggttgtcaatagctatttgatatttggcagcagtttctatcactttccgatagtgacgtacaccatactgcccgtcatgagcttctttaaaatccattaggcgattcacatatccggttttcacgacatgcactccatattgttgatagaaagcaaaggccttgtctaattggttctcgtagttgcgggttgcagctgctgtttcatgatgtccaatcaattctacgcctttctcacgtgcataatcagtgattgccttaatatcaaaatccggataaggtttggtgaagtctaaagaatccccgtgtttcatccagtttccttcccagccgacattccatccttctactaacacaccggagatacaattttctgatgcaaagtctatatatttctttgtattagcagtggtagcgctgtgtttgggaccataataccatgttccttttcctaaatgcatttcccaccatataccgatgtatttccctggttttatccaggaagtatctttaattttggagggttcgttgagattcaacatcaaataagatgtaaccagatcacccggtttatcaccaataacaactgttctccaaggggtaacaaatggagctttgatgtatgctgctactccattagaccaaggaactaatgaagcgcagagtgtggcagaatccttgactgtcagattcattttgggataatctgtcaggttagcttcgtgaatggcaagatactttccttctgcagtttccattgttagaggagtgcgtacagtatccagttcatttatggaagagaatgttgctatacattcataatatggatcggatgcgggaatccaccatgctttatgtatacgcggcattttaaactctgttgcttcgctcataataactaatgaatccatggattcctgttgcggaaactcataacgatatccgataccatcattaaagagacggaatattacattaagtttacgttttcctgctacctcttgaagtagtactttcaattcattatagtggttacgtacatatcggctctctccccaaggttgttcccaagtttcgtccaaggaggaacgttcggtgcctttaattacaaaatggtttaagctatctccatgttccaggataaaccctaatttagaagggagtatcatggtttcattctctttatttactgcgtatgatattgtattatcattctctgtgactgttagttgtatcttaccatccggggactttagtaccagattatcagtttggttacaagctgaaaggaagctggtgattcccacaatataaaacacttttcttaatgcagttagttgattcattttctttccttttttatgtttttgcttatttaggttgctgcattttacgggtatatacattaccgcaatgatctgtaacttctacacgtatttcggaatccttcatttcaggaaccgcataaaacaagtgttcagtaatgtctgctcccaaatacttatgtttaaatgtagaactgtttttatcacagtattcataaatagcagggtcgtatccggaaaaacgactcatttctcctctgtcaataccgttttcataccatttcactttccaggttgggtcgtaattccaaacatttgccaccactgcttcctttttatttcgactggcacctaccggataaagttcaaattgatagtccttatcttttcctacacatttgtaataccagttaactttacctccgtcaaactcgtaaacggcatatccgcccggagttccatcacaagcccagggagcttgccaaaacaatgttgacaagggggcgtgcacgtgttcgtaaagattgtctgccaacacataattttcattatagtgttcatgtcctgacatgatatgagcattgtaaggttttagcaactcatacaaatgagagcggttattcattactttcatagtagactcctttccccattcctttcggcgtgcttctcttgaataggtagggatatgtgtagcaactactactgtggatcccggagtgacttgtttcaaatcctgttccaaccactggagttgttgttcggtaagataaccaacatacaaatagctttttgcaataaagaaaatatcatcgagaacaacataatgcacatttcctctattgaatgaatagtaagtgggaccataataagatttataagtagtacgtgcatgttcattggaacgtacatttaaatctaagtcatgatttccaattacatagaagaagggaatttccgtttcggctattgcatctatcatgggcgcaaaatagctgggctttttattgatgtcaccaataatatctccacacactattccatacgcagggattccctgataactagttgccaacagctctttcacatcttttgaggcctctcgtacttgtggcatttcttcgtcaaaatacacttgtgggtcagcccatacaaccaaaacgtgcttttggttattcgtagatgattgtgtcagctcaaaatcaaaatgtactttctttgaaggttgagcaggcactttttgaaagaatacagggactttacctttcatcggaacgtcatagccatcaggaagggtaatatagatgtattctgcatcagaggtacttgtcatagagtatcgtcctttattatctgtaaggacaatctgcgtaccatctgtcacaggtacattagccactcccttacctccggacagtactttcccgtaatagactacgggagtagttgcagcctgtacactaacgcaggaaatactccattggaacagacataaaagtaataatagtcttaatttcattctttaatcctttctattttaatcaaacgcgtaagaggcttgtttattttatatatttgagttatcaactgggctatttcagcctgccaggcttcacgtatctgcggaaacatggcttgagtataattggtatataaatacttcaccagataatgactttcccgttccgctttggcagcatcaagagcagctttattatctgcaaaaagtaatcctctatgtttaaaaaagacatactgcatagccatatactgacgtaaacgtttttctatggcgcacctttcttcattcagatacatgatagacagactctgttggtattggggcgtacatgatatttctgccagattaactcctttactcaattcgtcgccactccaacagccaatttctattccatcaatagtaacccggaaaatgccatgcaaatcagttactttcattatttcctgattcatttcctgcataaagggaatttgtctgatagcatcccgagctgtacctttcgttccccagcgaggaatcgtgtcgatagggaaaggcaatgaacgggataaatatctgaaagatattgtgtcattttcattctttatatgagatattcggcagtttcgctcttccattgctttcctgttagtggcattgatttggaaagaagcgatttcctgtcctgcaagtccctgtgctttcaggaataagtatgccattaccatatgaccgtctttatcaggatgaatccggtcaccgccacagaaagtagctgtagaatcagatagctgaatctgcttattcaacccgcacatcacagtattgaaattgacaaatccccatcctctcttttgggcaacttctgcctgcatttcaataattcgtttgatcgtctcattctttccgtgtagtacttctactcctttcaatttcacattctcatcatagggaggagaacctagaagtactacgctttttatttttttgtcagcaagaatctgtcgttgcagtttttcaaactctgtgtgagcatactctacctgctgattcgcatacttatcatatccgggcttattatatccgtcgaatccggaatcattcatcccgaaagaacagatcaaataggtcggctttttgattttaatatctgaatcgaaacgataaaccatgtggctcacacaatcaccaccaattcctccattatacatacgaagaggtaaattggggaagtgcgtcatgtaatacagccatatataagaatgataatgccctccttccgttatactatttccaagaaaaacaattctgtcatttgctttaaatgacggaatttgctgcgcacttacaggaaacgataaaatgcaacaggtatataatataaatagtattttcttcattactaaacctttttattcaactggagtaagaattgctgcccaaccgccacctttagccatggtgatgttaattagttcatcttttgaaaccattacttcttctgttttaaaatccgaggcgtaaacgtctgcattcacaccgtctttgaaaatttccattttatatttggatgcttcaaggaaatccagtttcacttcaatattacgggcattccagtctgttaaacctgccaaataccaattcttaccattcttacgggcaataactaattgttctccgattttagctgttatagctttagtatcttcccaaatggtaggtatacgggaaataaaagaggcaaattctggagctttataataatttgagggagaatctgctaacatttgtaacgggctttcatacactacatataaagctgcctgatgggcgcgtgtacctagactgatcggatgtacgaaattgatgtaaaagtcttccgctgttgcattgtttactgcaccgggagtataatccatcggaccggctaccattcttgtaaacggaagaatcaagtcatgtaccggattaatatctcttgaatccttatcgtgctctaatccaagtacaccttcaaaagtcatcacattgggatatttcttctgtaaaccggaaggtttgaaagaaccatggaaatcaacgagtaatttacgctccattgcggcttttcctacccgttcgtagaaattaaccatatattgatccgaacgttgcataaaatctacttttatacctttgattccccatttttcataaacatccagaatttcgtccaattctttatcaagtgggttccataaagtccataatacaagacctacatttctttcctttccatatcgtaccagttccggtatatccaacccgggtattggctccttaatattccaggttccagctgaccaaccttcatctaataaaatatattcaattccgtattttgaagcgaaatcaatgaaatatttataggtatccgtattcacacctgccttaaaatctaccccgtatacgttcaatgtactccaccaatcccaagaaatctttccgggttttatccagtctgtgtcttgagtaacagatggagaggctaattgatacactaagttattttcaataaccgctttgtcgtcttcgttaatcattaacacacgccaagggaaagttcttgttccttcagtttcagcaatgtaagaggctttctccaataatacttcgtcacggtcggcaccttcctttaaggcactttttaaaactacaggaggaaattcaccggatagcgtgttattacgatcacccgttaaaaatagattgggataatcgaaaagatcggattccataataacaactttcgttcctttaggagtagagaggtaaatgggtagatagcctttcatatccttagtgagcgaggagatgtttaattcatcaaaaatggcttcgcagtgtgtgaggtattcttgattcttttctcttggccaatatagcttacacccttcagtccagttctgttcaatagtttcggtattaataataactttaggttgctttaatgaagtctcaaaacgataagcggctccattgttatatactctgaagactattgcgtagttacctttacaagtcagagttaactggttatattgatctttgataattctttgtttaagtggaatgacagctgtttgctccgaatttactttaagtgttttagcttttattactttcggatttactcccggttgttcagtctgcccttcaatatccatctgcatcagactgggatttagtatacgttcaccattgtaattaatactccaactcaattgttttccggctgttaccgtcaccttgatttttccatccggtgaacttacagtgtagtttttggcttgagttactatgcatgtgcataaaataatgtgtaataatataagtactcgtttcattttatatattatattttattgaatattctctatttaaagactctctgctcgttgaattccttctttaatgggtgtccattgattgaattctattacttgcacaatgtcaaacaccattaatccttcggattgggaaagacagacataaacagcatctgctatattgtccttatgatttaaagcatacaaagtgccatagactttacatgctccatgaacaatgcgttgtgcacgcgctattccatattctatggattcgggatcgttcaatccaaatattttggttaaataagttccacatagaaaggtgtctaacaatccggcaaaacctgtatttttatattcaggtgaagcccaactgtattctttggaaaaatcgtattcggtggatgcccaattttgtccttgcccataaatagcatgaatccatgaggcagcccaatattctaattgaatatccggtttaatgtttttaatttctgtacgcacccgttctacaaaattacgtatgaccatagagcggaactcccaccatttcttataataagtccctgtccgtttagtgccatctgtattccaaatgaaaatatcatccgggaaccgatctaattgctttccgatgtattgttcgaaagctatttttgttgcctccgaaaaatcactttcatctcccggataacggcaatagtctaaggcaaagccatcaaaattgtaatttgtaactaactcttttataaaattcagacaaaagtcttgtacttccggtaaaactgggtttaaaaaggcggagacttttgttttatcgtccttaatatctatcaaaccctgatctttggtatattccaaacaagtttttccatcccatgtatcatcacggtacgccattccatttttagaagaaggtaagcctgccgtaaatatagtagcagagaccgttactttaagttcacgtttatgagcctcatcaataaaaaattgaagataatcccaatctctttcgatatgtgtaccggcaagatcggtcaatggggttaaataagaacttttaaacagggcatcgccttgtacaggacgcacatctactacaattttattaaaacctgttgatttggcgagatcaagataatatgtgatattctctttttttgagaaacgttcaaaatttgcttctgcatcaaaccatagcattttttctttttcaggagtgggttcttccggaatgacaggagtgggaggatttggctcgggaagctcggattctacagtctttgtagaacaactactaaatgatagaagaaaaaagaataataaaatgcttggaatgtatttcatactttattgtttttatttctcgacttcaggctgatatttagaaaaaaatacagcctgaaatcgagaataataagaaagctaaataaaacaaacttgttatcctaaagatctttcgaccgttattttaaagctactgccgtagttatagcacgttgggcaccagcacttggctttatcaccggttgaccgttgaccaacatacaagttgaaccaccaccatcaagattcatagcatctacacaacctaaactcttcaggatattagccatcatagccatattcataccttttacaccttccgttacactgcggccttcacaaacgaaaaatatcaccttattattggctgttactccgatagcggttcttggatgataattttcgggagcaactccactttcttcatcaaaaagttcttcaataaaagtatttctcacacttccgtctttcaacaggatcggtccacctccaatcgccgtttctgcatttaatttcacgcctctcgtcggaaaataagccgaaggtgcaggttgaggctcataaccggacttattgggagaaggttgttcataggtatatgtcacaccatcagttgttgtataagcccaatctgtggagaaataaccattcttcgacagctgaaagatacctcgtgtaggataataactcttttgagaacgtatttcctcctgcgagttcacagctaagacctctccttcacggcatagcagactgacagactttccggctcccattacaaaatatccaccattcataattatcggatatttttgttgttctgcttgccagatttgattgggagtcttagaatatatctggtctccgatagttgcaaaatttgcttttgacatatccgcaacagcaataaaagctatggctttcatgccttccagttctgacggagatttgtatacacttatgtattcaggtaacgtgccaaactctgttgtctgtttaacccagcctaatgttgtcggatcaggatccggcattaccaccttttcattatcatcatctgaacaacttgttgcagacatggcagcaatcatgaaaagaagccaatattttgatatatttttcattatcatatcgatttaatcgtaaatatttatttcttatcatctctgtgcttccgcacgttcaatacctttttggatatcatcccacagattcatttcaataacctgtactatgtcgaatatcatcaagccttccgatttttcaagacaaagacttactgcatcggctatattggttttatgatttaaagcatatatcgttccgaatactttgcaatcattaccaactaatctccgtgcacgggcaataccatactctatcgattccggatcatccatgccatagatacgttctaaatacgttccacataagaaagtatccagataaggtgcaaatcctgattcattgtaggctttcgatccccacggataatttaatgagaaatcagattctggactggcccaattctggccttgtccataaataccatgaatccaggaagcagcccaatactccagttctactttattattgatagaatgaatctctttacgcacttctttcacaaaacttgtgataacattagcccggaatgcccaccattctttataataaacaccaggatttttcgttccatcggcattccatgtaaaaatattatctggaaagttccggactttttttcctaagtagtgttcaaaagctttatgactatcagcagagaagtcactatcatctcccggatatcggcaataatctaatgcataagcatcaacatcatagtttttcactatttcacgaacaatacttaaagcaaatttgcggacatctttacgaaccggatttaaaaaagctcctacttttttcttgtcctctctgatgtcaagcatctttccgtcaggtgtatattccaagcatgttttcccatcccaacgtgactcctcatagaccaaaccttcgttggtagcgggatgtccggacggaaacattgcagtagaaacagtgacttttaatcctaaccgacgagcttcattgataaaatactgcaggtaatcccaatcacgatgaattactttgccatttactgttgtaagtggaggtagaattttacttttatacagtacttccccgtatataggtttgacgtctactactacttgattgaatcctactgacttggctttttccaaatagtaagaaatagaatctttagaggcaaagcgttcaaaattagcttctgcatcaaaccaaaggtatttaggttgttttttgcccctgttcccggcaaaggaacaggtagcaaataacaatagaaaaaacgatataatgcttttattcaacatatttcaattctatataattaggagtatgcctatttctcgtattttgtaagttcataacaacgaatacctacaccataaccgtaatagagatataatgattctccgtcatcacttggtgaacaagtagtccagatacaagagttggtagtccatggctcgagtgtttctgtgataggtaatgaatgattactagacgggtctagcaggtgtagtccaacccagccccaaccgcaagttatggttgctccgtaccatctgccattgaatggaatacctctaccggaaataagtacatgatttccccagccagcgtatcctttcttattccacatgtctatatatggacctgtgatgctgttaaatgcccctgccgtatttgctttataaccgatttccggtcccattacacctccggcattcactgcgtctataacataaaatggcgggttatctgacactccgagtacagccacaatctgtcgccagttactatcattactgggacgaccggtaaccaaggttgaagtgcctgtatatgtaccattctcaaatttgtaaactgcatgtgtacctacaccatcaggtttagaatcataaacatatcccactttgtcaatatcaccgattgcagaaactttatttgctccgggagttacattagcaaccttttgtggagctccctcaacagtagtccatctgtataatcctacgttttttactacaccgatcaaattaccagcgtcatcattgactaactggcacaaagaagcgtctattcctgtcacatttaaagtcttatctactttctgccctgtatatttatcatagaaattaaattgggtgtctattatataattaccaaacactgcaccgaaaccatctttgtctttattggatggagtaggtagactaatttcccattttttgaaaaaatattcaaaaccttctccatcatttacttttccgccataagtccattttacggtccagtcagtggttgtgccatcttgcgccttcactgtgtaatgtacatcttttgaaaaatcttgaggtacatcgggggtaggtgtaactgttgcatatggagagataaagaaagaacaagtaactccattgagtttgctcaaatccaagtccggagtaatcttaaattcaatgatgttaccatccttaatggtaccctgtttataattaccctcgcccaatctaactttgaatccggttatatcggtatcagagtataatgttggatcatccgagcatgcggaaaatgcaaccattgttgccatgacagcaacttgaagccaattatgatattttattttcataacatctacttttttagttatttgggtgtttagcagtcagagtatactccttttgcgttccatcacctgctacaatagttagtttaaatggagtagataaatctttagcaccagtcaatgaaggataagcaaatgctgctacaggcaaattggctgttacatataattcgctcaatttcacttttgccggaagttcgaaagttatatttccattctctgatataaccccatcataagtagtaccatcttccggagaattagcacgaaccataatggatatgatatcacaatcagaatgataatggatatcatcatgcttttcacaagaagaaaaggaaaagctaaatgctatcattaatatgatgtatgtaattactttgaaatttttcataactataataatcttttaatattaccaaggagcattattctcacataacggattattctgtaattcatctacaggaataggtagcaagtaatagcgttctggaaagaagcggtttatattgtcgtcacatgacacttgttcataagtataagaattatcatcttttttggttatttttgttccatgtgcctgttttccatcaataacttcgccagccaaacgccatctgcgtaaatcccaataacggaatccttcaaaggccaattcacaaatacgctccttacgtaatagtttcataaatgagtctttatccggtgcttcctgtgttgtacgttccggtaggtcaacacgtcttcttacttcattgagagcttccaaggcatcatcctgatttttagcataatcctgttctgccagagcttcagccagatttaacaaaacctccgcataacgcatttcaatccaaaactgatcgcttcccttatcatcaaattcggtattgttttcttgtagatattttctgatgaaatatccggtaacagtttgtttttctcccggattcatattatctctgtaagcagcaaaaccgttttcagcgtctacataggtataaatagtcttttctttccaagtagccccattatatataatggatgcatagaaacgaggttcacgacctacataaggatctttggccatggagccgctccacgagaaaggagttccgtcagccatatcataagaatcaaccagttcacttgtcgggacagctcttcttattccttgtttaccgtcaggagcaaaatagcgatcgaaataatggggcatatccggaattttgtatgctatggagaaaataatttctttattacctgccactttaaatacatctttatattcatccattaagtcatacttattgagctttttaatctcatcagcagcggtaatagcaatatcccaacgttttgcaaagagtgctgtacgacacatataggcatacgctgctcctttagtcaaacgcccatcccatttgctgtcccattctttcggaaggtgttgggctgcgaattccaggtccttcagaacaaaatcccatgattcggcttcagttgctcttgcttttgctttttccccttctgaatcaactccatttgtttcgtcacgaagaataactcctccgaaaattctaatcatacgtgcataattcacagcgcgaataaaacgaatttcagcaatacgagtattgagaaaatcttcattaaacttacttccatagataccggcatcacgcaaaaatacattttctctaaatatgtcagtataaagtccccacgatgacatcggattattatctgatgttattgtgttttgctgcaacagaatcttgttatgagcactccatgtttgtggaactccatttccatacttaactaaatctgtatatccatcggttaaggataaagaagaaaagttggataagccattgagaggcttatataagtaagtcacatacatatctaaagaagattccgagctccaggctactgtttctgaatatgagtctgtgggatctttctccaacaaatcatggcacgagattagaaactgtgacgtaaacatcagccctatccctaatagatataatctttttattttcataattattgatttaattagaatgtgatatttaatccaacactataattcttttgttggggataataaccattatttataatagccatttcagggtcgcaatatttgaattctgtgaaagtaaacagattggtgcctgctacatatacacgaacgttagatagtccaatattggctttcgcaagtatttttttaggaattgtataaccaaactgtaaattcttcaaacgcaagaaattaccatttaccaaccaccaggaagaggtatatgcattatttccattatgaatggcacttaatctgggataacgggcactcgtattttccggtgtccatgaatcttctaccagataataaggagcatttcctcccgagtagaatggtcgtgtatagaccgtattgtccattgaaccatgattataagtaccattcaacgtataactaacaatagcagctccttgccataatgcactcaaattgaaccctttccagttgaagtccatagacagagagtagtttaactctggtaaagtgctgtggccgattttaactttatccccatcctgcgtaattttaccatctccattgatatcctcatacatgatatctcctaaacgttgaactccattaccaacaaaaggacggttatccaattgctcttgtgtttgatataagcctatagccttatagccataaatttgtcctaaaggttcacctatgtttgtccggtaccaaggagtactttcactttcaatccgcgacagaactttatttctagcccacgctacactaccggttatactataataaaaatcattaacgtggttttggtgcttcaataccaattcaaaaccgcgattgtcgatcttacccgtatttcctttttgagcataatttcctcctaatgaaggagggaaaccgccactccggctttcttgtatatcttttgtcagcttataaaataaatcgaattctactcccaataatccattccacattgtcagatcagcaccaatattgtaactgcgggtagtagaccaggttaagctggaagtaatagagttggatgcacctaatcctgcataaggaactcctccgaatatatacgcattcttctctaccttaaaaatgcttctatgcaaaaaagcatctgtattatcactacccaattcaccgacagaagcacgcaactttaacaggttgatagaagagaaattgttttttatgaagttttcttcagagattacccatcctaaagatacagaagggaagaatccccatcttttatcttttgcgaatttataggatccatctacacgaaaagcaaattctgcaagatatcttttatcgaaaatataattgaaacgccctacataaccaatagtagctttatcgctatgactacctgtaggattggatataaattcagtacctaatgaaagatcaaccggatcattaaaattatagccacccatctttcctgtcattgtagagcctttcagttgtgtctgttcatataagaatagggctgaaactgcatgcttgccaaaggtattagcatactccacactcgggcggaccataaatcttctgaaagaagatgcagatttagtgtaattacctttctcgcttgtagaagaggcacgcattaaattatatgatttagaatctgcactataagcattaacattgtatcctaccaagaaaccgttatcttccgaataactagtatcataaactaaaccgagagaagctttcaacccttttacccaaggaaaggcataactaattttcattgtaccatcaaactcatgtctttgttttttctgaaatccgctattccttaaagtagcgagtggactctgtgtggtggaactaccaggaccaatccaagctgtatattctccttgataatagataggaataataggggctgaataaacagcctgctgaatgggattttgttcagcctgtgcgcttgtgctaattccgggccagttcttttcttcataaaagccagaaatattaagttcgaacgttaaatctttggtaatattaccttctacgttagaacggacattgtaacgatcataattcacattttcgatgataccggattgatccaacatgcctatactggtgaagaaacggatattcttgttaccaccggaagctgaaatattatgttgatgtgtgaagccataatccttaaaaacttcttttgtccagtttgtatttccatatttaccttctggatcatagttgttagccactttcgtctgaatatcagctccataatatggcccgttaccatcaagttcacttgccttattataccaataaatatagtcaggaccatttagcatttcaggcatggctgtatttttctggaaagtaacagaaccgtcatacgaaagagttactttaccttcagtacctttcttggtcgttaccaggattactccatttgccgctgccaaaccataaacggatgctgtagctgcatctttcaaaatagatatgttttctacatcattaggattcacagtattcaacatacgttcaacgccatccactaatatcagaggactagaatctaaaaaagtacctaaaccacggatgttgatagatgtctggtcgtttccgggaagaccggaacgttgaacactcgttacccccggtaacttacctgtcatcatattagaaaggttagcttgaggagccatcatcaactctttagagcctacttgagaaacggaacctattaagaatttctttttttgagttccataccccaccactacaacttcatccaatgcttgtgcatcttcttgaagtctaatagtaatttctgaacgaccatgtaaagcaacctcttgagtctgatacccgacaaaggaaactactaaagtcgattttaaatcctgtacatttaggctaaactgtccgtcaatattggtaatagtaccgttggacgaattcccttttacactaacagtagcaccgacaagcggctcattgtttgagtcatacactgtccctttcacgttcgtgtttttttgagcatgaacgtttaagaaagaaagcgaacagatgaataaggctataaaccttatactccatgtgatttgtttctccatattaaatattaatgttaataaaacaagatagttatttataattcatcaaatcttctaatgttttccagcactgatacagtcctcttggcacatggaagcatcctttccattttcctcctttgagtggtagcaatatttcgcctcttcggttcaagtagccataccattcaggatattctttatccttgaaatgctcccaagtgtagtcatgtaccttttcaaaccattccagacatcgtttatctccggtcagttgataaccttttaatagggaaataagcgtctcaatatgcacccaccagagtttctggtcccattccagttgttggggaggacaaccgttacgatccataaaatagtagatacctccatattgcttgtcccaaccataattaagcatcgtgagagtagtctctttggctttctctatcaattccggacgattcagacgcttgcccagatccatgataaaccacatcgcttcaatggcatgccccggagtcacctgacgaccttcaaaacaatcgaccagattaccgtctatgtccacgttttcaacaatgatacctccgagttcaggacgatagaaaacttccatcacttcatggatacaagtatccattgtttcccgcagatacgtttcatccaataaatgctctatctccagtgccaggttacagaggatcattggcaaggcaaagttcttcagattacgggtacccggatgaagcttattccatctccctttcggattatccactttggaaaggattatatcgaaagttttcttggcaatgttcgcatattcctgattaccggttgcaaggctcaactgtccgaaagccatggtggcgaatgtatacgagaatatattatacggttctaccaatggtctacccgaacgatcaagggaaaaataccagttatagttaccatcatgtccgtatttttttagaaattcaccaccttgaacggcacaatccagccattccttgcgtttttccactttattgtaaagcatggagaacatccacacctcacgacattgcagccagatgaacttatccgtatcgaacacttttccttcacggtccagacaggtgaaataaccaccatactcgtggtcttgggagtgttcaagccagaaagggaggacactgtccagaagttcattcttgtacagacttgccagtttctcgaaatccatactattatttccattatagattggtatggacaattcagcagtgaaagagatgtccgctgaatgaccaatgttattcttactatccatatttataaaatgttagtttattgttattaaggtctgttttatatttattccgaacgggtccagtatctttcaatctcctccagcgacttcccggtggtctccggcacgagtttccagacaattagcatatacggtacgcacataacggcaaacaggaagaatgttccggcgggggtaaggttctggagcatccagggggttaactgtccgatcaggtacgttcc

SEQ ID NO: 587 - DNA, 99834 bp, Bacteroides ovatus
  source 1..99834: mol_type = genomic DNA
tatttaccttttcttaattcatcaagcctctgcatcgcaccgctgaacttctcactaaacatcatatcatcgggcaaaacaaaccaggtgggaatacctctcgactgtggattacctatacattcatcttgcccgttctgtttgcggtaatcgtcccattcactataagcgatgttccaacgaatacctaatttataggtattttcccatttaataatagccagtgaataggccggatcatctttgccgtcataaatcacttctacaacttcaaccacccctttaggggaatttataaacttcggatttttatacgaataagtgctcatgtcttttattttttattcatagcacacaaagatactcaaaacaaatatatacatatatacatacgtatgattaacgtataaaaacatttatggttattctaatctttgattaattccggtacagaaacaaaacgtaccgaaagacggaaacaggatttatttcggtacgcttccccgatcggtacaaaaaacacgcaaaaaacgaaaatactacttttagtcttttagtatattagtattttgactatatgttgcggacatgacaaccatttaaaaaactgaatttatgagcaaagcaaaagtaatctccgtattgaatcacaaggggggagtaggaaagaccacaaccacgatcaacctgggcggtgcgttacgtcaaaaagggtacaaggttcttttgatcgaccttgacgggcaggccaacctgaccgaatcgctgggcttctctgcggagcttccccaaacgatctacggtgcgatgaaaggcgaatacgacctgccgatctacgagcataaggacggccttagcgtcgttccctcctgcctggatctctcggccgttgaaacggagttaatcaacgaggccggacgggagcttatcttagcccaccttatcaagggccaaaaggagaaattcgattatatcctgatcgactgtcccccctcgctgtcgctgctcacgcttaacgcactgacggcctcggatcggttgattatcccggttcaggctcaattcctggcaatgcgtggaatggccaaacttatgcaggtcgtccacaaggtgcagcaacgtttgaactcggatctttcgatagccggggttctgataacccagtacgacggaagaaagaacctgaacaagagcgtttcggaactggtacaggaaacattccagggcaaagtgttcagcacccatatacgcaacgccattacgctggccgaagccccgacacaagggcaggatatttttcactatgcccccaaatctgccggggcagaggactacgaaaaggtatgtaacgaactgctaacagaaataaagtaaccatatggcaaagaagaacgatttaaaaaacagtatgtcggccgggctgaccgggggattagacagcctgatccaatccacggccgggcaaaaagaggctcaaaagccgaagaaagcgaaaaccgtgcattgtaattttgtcatggacgaaacctatcaccagaacttaaagctgatcgcgatccgcaaaggcgattcgctaaaatcggtattgcaagaggctatatctgactacttggataaaaacagttccctgctataacagcgtatcgggaatatacagggcaaacactccacaaaagaaattctccaggaaaaaggtacgcaaaaagcacccctacacatcaaaaagtatattgaaaatgcgattccctataaagaacccgttggcgggattaatcttgcgtatgtttaacctgccaacgggtacgatattgataaactttttgtttaaggtttaacgtttacgttgctatttgcatcaacccagcctgttgtctctgcatcaaactggatcggattcaacacagcctctccctgatcagtataaccaccaccgaaaatcaacgtgtagatatgacgcttgcccgctacccatgtatctccgaacggaacataaattgttccgtaactatctgctgaacccaacagataacctccggactgctggattttgcaggtgatcgacaggtaacattgatgcgcaccgtcggcttttatcttggtattggtggcttcttcggaaactttccatgctgtcagcttctgtggtatattcagcataggagttttttcggaaatatcggtagctgtggtattactattgacctcgatgaatttgccttgcactacggtaataaaacctcctcctgtagagctttcaggccaatcacccacagcccaacttcccgttccatcggctgtcgcaggcaatgtgtagacgccgcccatttttacattaaaaatcttgatgtcctttatattcacctgcatgttatcgtattcggtctttgctttgaatacgacctgtgacagaatatgcttgaagttaaatttcactactccgttgttcttgtcttttgtctggcctttggctatggcatacatcacgtcgtagttttcatgagcattgataccagatccatactcatcggagcaggaataagttatcttttgagtatccttggtggcttcccacatataactccactgcatggcttcatcaaccgttccgggattgaatgcgtaaaagtccaaagcctcggtaggccaataacgaaggtcgctcgcatttttataatcccacttaccattattgtacacgatattcactccgtcatgtccaaaatccgtgtctacctttcccatgaaggcagtaccatccgccgtaaaagcgaacacgtcgaaatcggtgttcttcaagttggtgttggtagtaggggtagccctcgtttccgccgcattacttaacacgttaaaaccaatcgcattccgtgaggaggtttccacattcgcaatctcctcgtctgagcaacccatgagtagagctccaaagattgcccaaagcattactgtactttttttcataaataaaaataaatcaaattgatacatataattaataaactcatattacaacactatatccatattcacatcatcccaatcatcaacgtccacatcaaatcccgcaccgtcacttcccggctcggatggaacctcataatcaaaattcaacaccagatgcacatcaccgacatgccccactaccgggacatcatgcacttggccgctcacgtcctgttccaatacagacatgctgcctgaacggttcttgagatacaaccggaaaacattgggctctccttcaagtgcggaatgtccaaacgtatagaatccgcctataatctgattccgtgaaaccattccatcaaagagcaggctctccgaaagaccggcgggcaaactgtcggcggacatgttaagcgagccggacatgccggaaagagcggcccgcaaatccgccaccctatccagtccccgaagaccgttcacctcatacgtgtagtgacataccatgtttacgggagtcagccgtactatctccgcgcttcctcccggaatgtccttgaggataacttcgtctatatggtcgccacacagccaaggtggggtgacagccattgtccggttatccggcgactgcacatcacgcgtatcggcagtaaaaagcgtgtaactgccgttttctttccaaaccatcccgtcggtatcgtagttgaagcaaattacccggtaatcattctcgggaagctccacttccccatcctctcctccggggaaatcaaatatccacgtgttgctttcatcgtcggtcggataaaatacgaccctcatgccttcaggcttgtcatgattggaaatcttggtccagtcgaatattacccgcaccgtggcaaagtgcggatgatcgtaacataaatccttatgctcacaagccgtcagtcctatccataaaaatatgaacaccagactaaagcgtatccgtatcactgcctgcctcctttcttccggctataattcccccgcccgatcaaccacaccaaagagatacccgccttggtcgggccgaaccagcggcggtttttagtggtctgccatacatagtgaccgtccaaagggatgtactccttgtacgatcctccaaggtagccgattcccaacgtgaaatccacattgaaccgatgtcccacaggtaacgagtagccgtaagccacgcctcccccgtaactccatttatcccccaagtaacctttcccacccaattcgaaatcataggtgacgatctgcccgtacaatccgacatgatgcccggaaaacggtttttccaccgctctccgaccgaaccagcggcgcaactccacatctcccccatagatacgccaataattatgcttccgatcacttttccaccaggcatacatccaattcccggccacagaccagttcttccccaaacagaactcaaccccgatgtcaggtatcaaaacagcgtcataaagcaagtttgttttcaccgccatgcaaaacggccgtttctttaccggagctatgacggtaacggtatcacggatgcacaacgtatcacgtgtatgtatatataccgtatctctgacgggatttatcggatcactatcatagcatattttcaccatcgacgaacgaagtttcggaaaatggaatttatacaaatatgagtatggcctcccccctttcagtcttttcagttctccccccaaataagggctgtcctggttttccaaacggacgatcttctccaacaaacgaaggacatcctccctctccggaacattcacatccgctctcaccatcgttataagtccgttccagtcgcttcccgaaaaatgaaaatccttctccaataccggaatctttatataaggtgatatataccgccacaaaacctctgctcgtttttcagacagccttccattcaacagcccccctccttccggggaagctcctcctattatttgaattttcctgataagacggacggagtcgttcaatgcggaacagattttagcaaaccgctccatctcgttcccattgtcaagtaaacatgtatctatatttacctttccttgatgaaaatagatccttaccgaatcacgcttctcctgagcggatatttctccgcttatactcaacacgagcacgaacaatacacatttaatataaaaaaaacatcttttcgtcatttaatcatttgttaatatgacaatccaaacccaggcttttacaccccctgaatttcaaccgctaaagatatgcacttataaaccaacctccaaagcaaaaaacaagtattttaaacttataaatacttaaaaagacaaccacacaacagctacaacacttaccacagcagccaatcacgcttacacaacaattaaaaacacttaacatcataaagaaaagtacttaaacatacaaaaaaaaaaaaaaacagttatttttgcaggaaacattatacttaataacacttaaaacaataaaacacatgaaaatcagcacaaaagccgcctcttttctaagttcaataaaaactcaaacttacgacaaaaaagaaagagaaatgataataacgtatcaacaaaaacgagtctttcatctatccctgctcatgctggtcttatgcgcacccatatacatatattcagttccatttcccaatgaacagttttattatattaacagcgtattattcctgtttatcattatgtgcactctcgcttattttaaaaagagagtaaatctgaccacgaccttttccattatactgatagccatacatatcgagatttttatcgaaataatttattgctcaatatgtagcggatatgaatatagttatcaaagagcattgataatgagtaacattactatctctctcttatttaccatgctttccatctgtgcctatatgagtaatatctccatcctattgtcctcccttaccatagcttcctatacaatctgcacacttatcaccgacgaaccgttcctatacagttatctgcctttgatcatcatcatatacaccatgatccccttattaggaagatccttacacagtaatatcagcagcttgctaaaaagtagcaacttgctaaaagaggaagaggaaatgcttttgaaacgtctccaaatgaaaaaggaagaactattcgcgttcgccgagttgttaagcgagaataacccggaagaaaagacaagctccctgttaaacataataggggaacaatccaaagaaaatctttttacagcccttgccgcataccagaaaaaggaaaaaagtaaacttgatacaatcaggagaatatatcccaatttatccccgtccgaattaaacatctgccgtttaatactgcaagacaagaccgtcagccaaatatgcgaattattacatcggagtagcggaaacataaccagccaacgagcgaacatacgtgccaaactcggactgaaaaaaagcgacaatttaaaagaagcattacaagaacgcatgaggctgtatgaagaagaagaacaccggcaagaagagttttcagccatgcgttagggattgcagagtaaagcccacagcctttaggcgaggacttgaaacgtaaagcccgaccgtcccacaggaacgcccaaaagaaaaagaatcccccgaacattcatccgggggacatccaagccgtcacatcaattataatacagattcagatcatccgtgccaatctcctttccgtcccggaaaacaaggcgtaaatcaatcctctctctgttttcattgccacaaagatagacataccggccaacatacgcatcatacttatcaatcagttctaacggtatgaccggcatgggaaaaggatacacctatattgcatatagcggaaaatttgtaagattaccctgtactttataaggcaacatagaaaatctctccgcatgcaattccggtctttttcccagtaatgctgtcaacgaattggcccggacattcccttcggccttcacttctatcggcaccatttgggcattacgttgaataacaaaatccaactcaagacgcgaattgtctgtgttatggtaataaatcggtgacacgcccttacttttcatctgctgcaatacatactgttcagtcattcctcccttgtattccttaaatatgtcgtttttaatcaagacttgggccggatctgtcttgaccatagcacccataagccccaaatcaaccatatagagtttgaaagccgacaggtcttcataaatatcaagcggaagctccggtttggtacatcgaggcactttatacaacaacccggcatttacaagccattgaatggccatctcaaaatcattggctctggcaccttttcgcaaagctccgtaaatgaatttcttgttttctttaaataattgggaaggaatgctgttccataccattcggacacgcggaacctgttctttgggcgcatgttttgagaagtcaagatcatagccttgcaaaatctccgactgtattcttctgacttccagcaaggaatccgtttctacatatttgagtacaacttccggcataccacctacataataatattgccgaaggagatccgtatatttgtcatgcaggaggcttatcgtttcaaaatccccactcataagcaatttacaagcttcttcttctcccttggcgacaagaaactcttcaaagttcataggaaatatattgatgacatttaccttccctacgggataagacacatcctgatgaagggatatccccaaaagtgaacctgccacagctatatgatactccggaacctcctctttaaaatacttcaaagattccagtgcttccgggatatcttgtatctcatcaaggataataagcgtatcacccggagtaatgtcaacggaagtcatcgcacgcagcccccgtaaaattctgtcaacattgaaatcctgagaaaaaagctggcgtgcaaggttattcttacggcataccacataagcctcttttttgtattcaagtttggcaaactcatggagcagccatgttttcccaacttgtcgggcaccatttaaaatcagaggttttctatcctcacggtttttccattctataagttgttgcaaaacaaatcttttcatctacaaacagcatttttatacatgtaaaaacagcgtataatacatttatccgcacttatttaaagcacaaatatactaaaataaacagataatagaagcaatcttatacatttttccgcactttaatcaactccaatggaaagcagtagccaatttaggattgccttctccacgctcgatggccaccagcgtattgatgcccacgcccgccagttcggagaagttccagctgattgaccttcaaactcttcctgcactctttaatcatctttcctagctctttcatattcacaacacattgtgattttagtcagttttcatcctagttcaaagaaaaaaacagccgataaagcaactataatcattgtattcatatagattaacatcatatattcaagttaatctatatatttacatggattatttgtatatttgcaaaaaaggaacaaccatgtggaatgaaatgagcaatccagctgtgctgatgagaatcggccagcgcatcaaagagacacgtatcaggcagcatatcacgcaggaagaactggcaacggcttccggtgtaagccccttgaccgttgcgaacatcgagaagggcaaatcggtatcgctgctgttgttcatcagcgtactccgctcgctcggcctgctggagaacctggagcaactggtaccggaaatccgggtcagcccgatagagctcaaaaaactgcaaggaaagaaacgctaccgtgtacgccatttaaaacaagataaccatgaatgatttgatagtagatgtaaagctatggggagaaagcgtaggctctctctattgggaaaaggaaagcaatgccgccttgttcgactatgaacggaagttcatccgctccggtcttgacatttctcccatcatcatgcccatcagccagtacaggaacaccccctaccggttccttgaaaaccgtaccgactgtttcaaggggttgcccggcctgtttgccgattcactgccggacactttcggaaaccagatcatcaatgaatggtttgccagcaagggattgtccggagaagagattacccctttagacaggctttgctatgtaggcaaacgtggcatgggcgcactggagtttgagccgtcctcgccaatcaacggcatgaacgaatcatcagtgctccatatcgaggaactgactgagcttgccaaatccgtattcacggacagaatggcttttcaggtccaactgcgccaggaaggaagaaacattctggatatactgaaagtgggaacatctgccggaggtgccaagcccaaggccatcatcgcctacaacgatattaccggagaggtacgctccggacaggtaaaagctcctgaaggattcgggtattggctgttgaaatttgatggcggcaaatacagcgaacacacgcagataacggacaatccacaaggaataggaaatatcgaatatgcctatcaccggatggcaaaagcctgcggtatcgatatgatggaatgccggttacttcaggaaaaagagtcatatcactttatgacacgacgttttgaccgtatggaagacggagagaagatccatgtacagacattggccgggcttgcccactatgaccgtgaccaacgccattcatacgaagagatattccgtatcatgcggcagatgaacctcccttatccagagcaggaggaactataccgaagaatggtgttcaacgtcatgagccggaaccatgacgaccatagcaagaacttatctttcctgatggatagacaagggaagtggaaactggccccagcatacgacctctgctactcatacacaccgggcggcaaatggacgaaccgccaccagctgtcactcaacggcaaacaagacaatttcacgatggaagatctgcaaaaggtaggtgagaacatgggtatccggaaacacaaacagattatcgaagagatacaggaaaccgtatcgcattggcatgagactgccaaggattgcggggtcaagccggaacacgccgattttatcggagaaaacctgctcttgttcggcaagcaactgcatacgatccatatgccggacattgccaacgaacaagagcaggctttcatgaaggctatgcgaaatgatgacttcaataccattctgaaactgaagatgagaggatatcagccatcggagaacacactgaaaagcctccagccggatgtatccgccaccaccttcatcgctgccgccaaaatcttccaaatggaagggatgctaaaaagccttcaggacataaaacccgcgcaaagcccgattacaggcggcaataaacgtagcatggaattgggggattagcacacaaactacatcgcgcacaattcaatataacagtaaatatattaattgttatatatcatattttgatttaacaattaatatatttacctttgtaaaatgacaacgaatcacatcacccaagccatggccaatccggaaatcatagtggaactgggcagacgatttaaggaatacaggctaacctataggctcacccaaaaagaggctgccgagaaagccggtgtcagccttatcaccttacgccagtttgagaacgggaaggcctataacatcaatatgggcaactttcttgccctgttacgagtagtggactgtctggaacagatggatgatctgatgccggaaatacctgtttcagcctatacaatggaacgaataatgaataaaaagccgaaaaggataagacatggaaaataatgttgtgagtgttatgttatggggagaagaagtcggaaagctctattgggacgaaagaaacaaaagagccgtcttcaactatcatccggatttcatcaagaaaggagtggaaatcgccccactgaccgcttctgtcaaaggaccggcggcaaagggtatgcccatactcggaaacaaagaaaagacttatcaaggtctcccaccgtttttggcagattcattgcctgatcggtggggtaacatggtcttcgaccaatgggcggcacaaaaccatatccccaagcgcaaactcacaccggtagataaactgtctttcatcgggaaacggggaatgggagcctttgagttcatcccggccactcctggattggaatcctcttccactctccagatagagagtttataccaactggcacgccgtatctttgaggaacgggaggaaatatccgtgcaagatgacgaagcactgcaactgcaaagtatctatgagataggtacatcagccggagggcagcacccgaaagccatcatcgccatcaatgaaacgacacatgatatacgttccggccaagtccctttaccggagggctatacctactacatattgaagtttgcagaaggggacgattttccgttcacgcaaatggaaatggtatattatgagatggcaaaggaagccgggattacgatgatgccttcccgactcattcaaattgagggaaaacatcacttcctgacggagcgttacgataggataaacggagagaagatacatacacagacacttgctgccatgaatccggatgcaacgagctatgaggatttgtttgaagtctgccgaaaactgaacatcccggcaagcgaacagtccgaactctaccgtaggacggtattcaatatcatgggcggcaatgtggatgaccacatcaagaatttctctttcctgatggaaagaaacggcacatggcacatcaccccagcctacgacatgacattcaccaccaatttggacggtgcggcatacgaaaacgcacactccatgagcattgcaggaaaagataacgacatcacggaagatgacctgatgcaatttgccaaacagaacggaataaagaatgcgaaaaggataatcgaagaagtcagccttgccatcagccatttttacgattatgccaccaatcatcaaatcgatgactattggaaagaccgcatcgaagagcatctttccggtttggtatctccgatcatagggaaaaccatgaaacactacctgcccaccattgtcgaaccctacgagacagaggatggctttttggtatcagaaatcaacatcatcgaaaacacccggcatgatttccgtatcgaggccttcataaacggaaagcgacagaaatacattgccgggcgtaaaagcgatttggctgctgaagtcattgccaaaggcagaaacaagatgcccgttgagaacaagaaagaacttgtggaacggttgttactgcctttagctagaagataaaaacagacgaatagcgacactattacattaataaaaagtctgttcttgttcggcaagcaactgcatacgatccaaatccggacattgccaacgaacaagaggaggctttcatgaaggctatgcgaaatgatgacttttcaataccattctggaactgaagatgagaggatatcagccatcggagaacacactgaaaagcctccagccggatatatcctccaccaccttcatcgctgctgtcaaaatcttccaaatggaaggggtactaaaaagccttcaggacataaagtctgcgcaaagcccgattacaagcggtaataaacgtaacatggagcaaacaaatttactattcaattttcagtttttttctatttctatactactgtacgccataaaataacgaagaaacttattcctatatcaattcataatcaataacatacaattcaccaagaatattagggaatgctacagtatcatatatcacctgccctactccattaaaattacccggagatattacagatgctacaacaccatgataagctgtgggagaaaaagaaagatctgctaatccatttatcccaataacatttttctgtacaccagcattattaacattacaaaaaattgcataatgaatagtttgatgtaaatttacagcagcattaggaagatgcacaaaatataatatatctccattattacatttagctaaatcatgataggtatttattttttgtatcatactttctaaagaagctccaaaaggattaactgaaattctttttcctgttgcctgttctataattcctctaactaaattagcacaccctccaccatttgtaggtaaattaacattcaaattctgagtattagtaataaattgtgtaatcaattgtctatcatttatacttatagccatatattataactcatgttctcctactctctcaaaggcttttcggaacctgcctataaaaactgtctctgtaagcttaccccacaaatctaccctataatccccaaaccgctatcatcccttttctgaatgccatggaattttttccgaatacataagttagaagatgaaaaaagattgtattcaaagtttttggttcttttttgaaaaaagaaccgctggccaaaaatccaacggttactttactttcggaaaaatatgcaatgaagtttataggccgaatgaggaacgcagcttcttcatggcattctccacatcaaagaaagacacatccataagatcttctccccatgcttccggaaagtcaagaatggaacgtccgttattaagaaccgcatcacggatggctttcatcacattctgccgagtcggttccagcttgaagaaaaggcaatgcctgactgccattgtaagggtatcatcatctataaagaaacggatggtgacggtcatgtgtacctgcgtccgtttctccagtttcttctttttagtttccagtttggccaaccgggaaacatagaatgaagggatatgtttcccggattcaacgcaagtcttcatcgcttcatgtatttcagcgatgccgtcacgtatatccgtcaagtcggtgcagttggatgcaaccgtataagccgataactttttcatctcaaaagccgtttttatatggcaaaagccctgtttgtgaaacttataatatatgaatctccttatcacctaccttctcgtccgatacgaccaatacctcgtacttcatcctcttgtaattatagactacggcaagcgtattaaagccaccgttatcataccgcctgtcataaacggtatgtacatactcatacatcgcattccccatcatgaactttacggaaacatccgtaaagtaaaatgccaccgcataagccagcgttttctttttatcaaccttttttgttttcataaccatttgtcctttattgttttctgataaaatattcaatggccgaatgaaccaatatataatgtgtgggtgtctgcctgcactgttccgcataaggattatagaactggagagccagcgcatggtataattccggcaattcccgcttgattctcgccgtaagcagccgataggagcattttctaccgtacttcatcagctcacgccatttgtcctgtgttatttccgtgcaattcgtctcgtaaaccataacttccgtttttaagttcaatattccggttggaaagcggaaaggggttgttccctctccgtttattctctaatcaattcaggcaagcttttaccgttataccggttttcagtcctttatccagctgcacggtcaacccacgaacattcacctcttgaatttgagaaagaagcacataaccccattcccattcttgaatatggcaataaccgaaaaaaagccagtcaccgtcttcctgctgttcggcttccgttaccaaccataccaccgaagaaaaaggaaggaaaaaccttgcgatgacttccgcattaagcccctgcccctcttttgagtacaaagggttggcttcaaacacattctttagttgttccgtcactgtaatcatatgtcacatttttaaagggttaaacttctaattttatgcttcagctagatttaaagaccttttttaaaacccctttccgggatgaccttttctttctgccgactttttttttgagctttcatgccccatctgagtttataagccttttttttacggcacacaacaagaaggaaggagggattgagaaaagttttggacgacaaaaaatgttggggacagcgaagccgtccggcgttatttttttcggtacaaagggcgaagaccggaactctttcgtatccatccaccgaaataaatttgccgttcaaaaacaaaggctctcagacggggctatgaaaaaacgtacattaggggaggcagaaaacaaggaaaagggcagtacggaaataaaagaagaataaaatccaacattattcacattgatatataatagccaagtatttcgccatatcaatataaatccaactataatcaaaatcaaacagttatctaatttattggttattaaacatataatacgccaaaacatttattttggagaatataatattaattaaacaaaaaaatggcatcattaaaaataaagtatcgacattcctctatagaaggaaaagcgggaacattgttctatcaagtaattcataatcgtgtagcaaggcagataaattcaggatacaagatttatcctgacgagtgggatattttcaattcccaaataatcataccagcaaagacaggagaaaaccggcatcggtatttggtttctttaaaaaaatgtattgaggaagacacctcacgtctaaaagatattatgataagatttgagaatcttggatacaaatatacggcagacgaaatcattgaatattattccgctcctcctgtgaacgagtactttgtgtcattttgtgagaatctcattgaagaattgagacaaataggtaaaatacgcaccacagaaacttataccactacgctcaatagcttcaagcgattcatgaatttcagaaagaaaggcagagacatccctttcgacaatatagactccaacctgatgatggaatatgaacaatatctaaaatctaatgacatttgtccgaacagtacttcctattacatgagaaacctcagagccatgtataatcgtgccgtagaaaaagaattggttatacagcgatatccgtttaaacatgtatatacgggcatagataaaactgtaaaacgggcagttccggccaaaattatccgacagatacgcgatatggatttaagtcacgactcctctttggaatatgcaagagacctatttatgttcagtttttatacccgagggatgtcatttatagacatggcttatctaaagaaaagtaatttgcaaaacggttttttatcatatcgcagaaaaaagaccaaccaacagctagtaatcaaatgggaaaagcccatgcaagaaatcatagataaatacgataccataggttcttcttatctattgccgatcattctcgacgcaaaaacggatgaacggaaacaatacaagaatgcagcccagctggtgaattcaaaactaaagaaattgggaaaacaaatcggccttcctattccgctgacgagttatgtggcacgtcacgcctgggcttctatcgccagaagcaaaaacattccgttggctaccatcagcgaagctatgggacatgattcagaaagcactacacggatttatcttgcatcgttagacacctccgtagtggataaagcgaacagtattattttaaatacactttaattcacattataaaacagtttacgccataggtttcagcatacgtgcccaatcggcccgctgttattctatggcaattattatttttatttatctgacaaaaaataagttggaattatgttatacaaattgaagttttctttctgagagaaagatttgtaaatgcaaaagtacaaaagataacacaaaaaacactaaaaatcagaagaaaaatattagtcataccataaaaaataagaggtatgattagaaaaaactgattatttgttgagcaaattgattataccaatcttataaatatttgatatacatcaaaataccaatcaccccatttctctcagaaagagaaacaccgaaaataggagaaatttcctatacgaatgccataggaatataatgaacaagtatataccctatactttcagttgtatgacaagatggattcagaaaggaaaaagccccgtgaaagtacaaaattcttgcttgaaaaagattgaataaatgacggttttctccataagagaaatgttttgaatatgcaaaaatacataaattattgaacataatagcataaaacaaagaaaaaccttaatagccacctcgttaaatgtcgtggttacataacaaatgttgagtaaactagattgtatttacagcgaataatccctgtaaatcaattatatatgttaaatatttatgtcctctatttctcttatggagaaaaataggaatgcggcaagataaaagacggcatgaatggttgatatgacagccaaaaaagacataaattactataatacagaccaatacataagttgggatgaactatgggtatatcttgacctgccgtaataactaaaaaacacacgacgaatgagtactcccataaccacaagggaagatctaactagaatccaatggttcgccatgagcgcttataaaaacgagaaaaaggcggaagagatgctcaaaggcaaggatggtctagagtatttcataccgaaacactatgccgtaagggtctatcacggagtgaaatccaaaaggcttgtaccagtcatcccgaatctcgtcttcgtgcatgcttcccgaaaacagatcacggatttcaaaaaaaaatataatttcttacaattcatgatgtgggagaaaagcacgggactgaaatatatcgtggtgccggataagcaaatggagagctttatcaagattgcctcgcagtatgaagaaaacactatttattataaaccggaagagattgacatacggaaaggtacccacatatgtatttacggtggcaagttcaatggagtaaagggcgtattcatgcgggtgaaaggaaaacgtcgccgccgggtggttgtgatgcttgaagggattatgggtatatcggtagaagttcatcccgatttgattgaagtcatcaatgattccgattgtgacaaattttgagagatgacacaaaaaggagatgatgaagttccccttcctcgtggccttacacaaataaaataatatttgaatatatgtatttttggattgtaaattgttcactggcatttttgctttgtgttctctgtgcgggtatcgtcattccccagattctgctaatcgctttccgtaagaaattgttcgactttcccgatgagcggaaggtacatcattgtgcggtgccccgattgggtggtatcgcattcaagccggtagtgtttttcaccatagccctgttgctaggaatcaatatggtgctgggacattcggagatattgtccgaaatcgggaacgacgtgtgctctttggcttttgctttctgctccatcatggtactatatctggttggcatggccgatgacctgatcggtatccgttatcgtgccaagtttgtcatccagattctgtgcggcgtgatgcttattgccggtggggtatatatcaacaacctatacggtgttctgggcatccatgcggtgccgttatggttaggatatcccctgaccatcctgatcgtggtcttcatcatcaatgccatcaacctgattgacggcattgacgggctggcttccgggctatgcagtatcgcctgcctattttatggactgactttctttatgctccatcagtatgtttatgccatgctggcgtttgccacattgggagtgttggtaccattcttctattacaatgttttcgggaacgccaaacacggaaggaagatcttcatgggcgacacaggcagtttgaccatcggcatgatgctctgtttcctcagtctcaaactgaccatgtgcggactagacgataatacaggaaatgtacatccgatggtgctggccttctcacccttgctggttccatgctgtgacgtggtcagggtttacctgcatcgggtacgcaacggaaagaacccgttcctgccggacaagaaccatatccaccataagctgcttgctctcggaataaagcagcgcaataccatgatcatcattgtttccgtgtcaactatattcatactgctcaatattcttctgtccctttatctcaatgtgaactggatcgttttgggtgatatattgatatggactctcgccaacatcaggctgacaaaatctatcgcacaacttcaatcggaacagaaaaccaacaaataaaaatcaataaatatgaaaatcagatacattttatccttattaaccgtggcctttctattgggatcatgtgccacaccgaaagtcgcttatttcacggacctgaaacggggtaccgcagagcaagtcttgaacccgctggaaatccggatacgtccagaagacaagatttccatacaggtcaacagcaaagaccccttattaatgaaccttttcaaccttccgatcatatcccgacagattggtacgacatcaggtacatccaatagtcagggaatatcaggatatacaataaataaggatggggatattgattttcctgtgctgggacatatccatgtggcaggaatgacacgcgcggagatcgcctcgtatataaaagaggaattggtttcaaagaatctcgtgaaagaccccgttgttacagtggagtttatgaacctgaccgtttcagtgttgggcgaggttgccacccccggacgtttcaatatcgaaaaggacaagctgacacttttggaggccttaagcatggccggggaccttaccgtctatgggaaacgggaaaacgtgctggtacaacgggaggaaaacgggaaaaaaaccctgtatcaggtcaacctgaattcgggatatgacctttatgcctctcctgtgtattatttgcagcagaacgatatcgtttatgtggaacccaactcaatgaaagcacggcaggcgaccgtcaacggcaataacgtccgctcagcctctttctggatgtcattggcctcgttgctgacgaccattaccgtgttgattgtaaaataatatagaatcagatatgatgaccgtaaatcaaaagaatataaaaccggggcagcaggatgatttcctgcgaatacaggacctgttatacctgtgcctcgcaagatggaagtggttcgtcttgtctttagcggtaacgatcggtgccgctactgcctatctgttacgcactcctgccgtatatacacgtaccgcttcggtattgatcaaagaggattccaaaggcaagtcggtctcctcggatttggaatccttctcggagttcgggctgtttcaatccggtacaaatgtgaataacgaactcatcacctttcgatcaccgtctttaatgaccgaagtggttaaacggttgcgtctggatatgaattacttcgttcggggaaaattccaccgtcaggtagcctatggactgacattaccggtggatgtaacgataaatgacttgcctgagaatgaatcagccggttttacgttggaaatacagccggacggtacgttatacctatccgactttatacgtaacgggacagatcttgaagaaaaggacgtaaagggaagcttgctcgactccatcactacgccattgggaaaaatcattatccatacaacacccaattacgtgaaaggcgaggcatatacattatatgtaggcaaatccagtctgtataacgccgtcaactcctgctcgtccaatctgtccgtttcattgaacagcgagaaagcgtcagtcatagacttgtcattcaaggataactccacacagcgggcagaagatgtattgagcatgttgatttccgtttataacgagaattgggtgaaggacaaaaaccagatcgctgtcagcacctcaatgttcatcaacgagcgtctgggcgtaatcgaacgggaactgggaaatgtggacgaggatatctcctcttacaagtcagaacatctgttgcccgacgtgcaggcggcatcgagtatgtatatggctcaaagcagtgcggccaacgcgcagatcctgtccctgaacaaccagctttatatgacccgttacatccggaactatttagccaacgatgccaaccgtacccaactgcttccggccaactccggcattgaaagcgccaatattgaatcgcagattgccgaatacaacaagcaactgttgcagcgcaacagtctggttgcgaacagcagcacggaaaatccgctggtcgtggatatggatcaggctctggcatccatgcgtggggcgataatcagatctatcgacaatcagatagtgaccttgaattcgcagataaaaagtttgcggcagacggagcaacagacgacatcacgtatagcggccaacccaacacaggccaagtacctgctttcggtggagcgccaacagaaggtaaaggaagctctttacctattcctgttgcaaaagcgtgaagagaacgaactctcacaggcgttcacggcttataatacccgcattgttaccccgccacacggcagcatgttgccgacatcccctgtgcataaaaatatctttatggtcgcattcgctctggggctgctcattccgatagtcattatcttcatgcgcgagaatatgaatacccgtgtacggggaaggaaagacctggaaaacctgactataccgttcatcggtgaaattccgctgttcacaagaaagaaaaaagggatattaggaaagaaaccgcaggaagtcaaggccgttatcgtcaaggagggcaaccgtgacatcatcaacgaggcattccgcgtattgcgtaccaacctggaatttatgaccggcaaggacaagacttcgaatgtcatcatcatgacctcattcaatccgggcagcggcaaatcgtttctgaccatgaacatcgccgtgagccttgccatcaaaggaaaaaaagtgctggtaatcgacggagacctgcgccacgcctctgcatcatcctatatcgactctcctgacaagggattgagcgactatctgggaggtcgtatcgataatctggatgagatcatcgtacccgatccgaaacataaatctatggatatactacccgtgggaacgattcctcctaacccaacggaattattgttcgacgagcggttaaagcagacaatcgatactgtaagggagcaatatgactatgtgctgatcgactgtccgcccgttgaactggtggccgacacgcaaattattgagaaactggccgaccgtaccgttttcgtagttcgtgcaggattacttgaacggagtatgcttgctgaattggagaaaatctacgaggagaaaaaatacaagaacatgtccctgatcttgaacgggaccgagggaagtggcggtcgctatggataccgttatggctatcgatatggttatcactacggttacggctcaggataccactaaggttccgacggaaaacagggtggggataaatggatgattattaattaaaaaaaataaaatgttttatataaaaatactcgtatcattgtgtggccattcaggaaacgtatatcgctgaaagatagcggtatattcaagaattttaccgactgtcactcgcacattctgccgggtgtggacgacggtgtgcagacgatggaagaagcattggaaatactgcgcctgtatgaagagttgggcataaaatccgtatggcttacaccgcatatcatggaagatatgcccaacaccacactgcacctccgggagcgttacgctgaacttcaagccacctatagcggtccgataaaactgcatctggcctcagagaacatgcttgacaacctcttcgaggaacggttggaaaagaacgatctgctgcccttgggtgaaagcggtgaccatctactggtggaaacctcctactttaaccctccgatgggattgaacaacattctgctccgcatcaaggctaaaggctattatcccattcttgcccatccggaacggtatgtttatatgggtgagtcggattatcaacaattaaaagacatgggagtgaagtttcagttcaatcttccgtcaatagcgggtatgtatggcaaccggattaagaaaaaagccatgctgctattaaaagaaaaggctattactcatataggaacggacattcacaattacaatatatttcaaaagttcatttgtacgagtattacaaaaaatatacaaaactgtttaattgatagtcagactgttatagtttaaatagattataattatcggttattaagacctgtagattctgtttaactttttctctctaggtggatttgcataaaatacatacaaaaaaatccaacaggctggaattcaatggaaattgtaacaatcgacttggagcagatacacacaatctctcttttatccaaaccagtcttaaaataaatcattacacccctatcaagcaataggcttgcaacttcaacataaaacaacaatccatatgtcattaacaaaagttttagttactggtggagcgggattcatcggctccaatttatgtgagtatttattggctcacgactatgatgtaatctgtttggataatttttccacaggtaaacctgaaaacatttttccatttctacaacgatatccgaataagtttaaacttatcgtaggagatatacggaatctgaacgattgtaagaaagctgtagaaaatgtagattacgttatgcatgaaggagcattaggctcagttccacgttctatcaaagatcctataactacaaatgaaactaatatatcgggattcttaaatatgctgacagccgctcgcgatgccaatgtaaagcgttttatatatgcagcaagttcttctacatatggagacagtcagtctcttcccaaagtagaagatgtgattggtaaaccgctttcgccttatgccataacaaagtatgtaaacgagctttacgccgatgtgtttgccaaaacctatggaatggaatgtatcggcttacgatatttcaatgttttcggtcgtcgtcaagatccattcggggcatatgctgcggtgattcctttgttcgttaagaaattcatggctcatgagagtcctgtcattaacggagatggtgaatatagccgcgattttacttatatagacaatgtgattcaaatgaacatgctggctatgaccacgacaaatccgaatgcaaccaaccaagtatacaatactgctttcggagaacgcaccacattaaaccagttggtcggttacttgaaagaatttttgagtgaatttgaccccgaaattgccaacgtgaaaataattcatggtcccaaccgcttgggggatattccccattccttggcatgtattgataaagcaaaatcccttttaggttacaatcctcaatacagtatgcgtgacggtttgaaagaggctgtcaaatggtattggaagaatatttaaagtaataataacagatgaaattatgaatgaaactaaaatttgcgtaattggtcttggttacgtagggctccctttggctcgtcttttctcgacaaagtataaaacgataggttttgacatgaaccaagctcgtgtgactgctttgatggcaggtcatgatgcgacactcgaagtgtcagatgaactactccaatctgcccttgccaatggttttaagtgtactgccaatatagaggaaatccgtgattacaatttttatgtagttgccgttcccactccggtagacaaaaacaacaatccggatttgactccgctttacggtgccagcacaactgttggtaaggtaatctccaaaggggatattgtggtgtatgaatctactgtttatccaggtgttacagaagacgaatgtatcccggttgtggaaaaagtgtccggattgaaatttaatgaagatttctttgctggctatagccctgaacgtataaatccgggagataaacttcatacagtagaaaaaatcaaaaaggttacttccggttctacgcctgaaataggtaagaaagtaaatgaggtatatgcttctgtaattaccgccggtacacatctcgctcctacgatgaaagtagcggaagcagccaaagtaatagaaaactcacagcgtgatatcaatatcgcatttgtgaatgagctatccaagatatttactaaaatgggcattgatacacaggatgtactggaagcagcttctaccaaatggaatttcctgccatttaagcctgggctggttggaggccattgcattggagttgatccgtattatttggctcaatgtgcacaacgtcacggttataatcctgagataatcttagccggtcgccgaatgaacgacggtatgggggaatatgtggccaaccaagttgcgaaattgatgctgaagaaaggaatacaggtgctcaactctcatatcctcatattagggtttacttttaaagaaaactgtcctgatgtgcggaacacaaaggttatagatatttacaatgctttgcgagagtataacgtacatatcaccgtatatgatccttgggccaatcctgatatagttatgcgagaatatggaatctcggtaacgaaccaacatcctttggataagaaattcgatgcggcaattatagctgtagcacacgaacagtttataggctttgatgtaaaaacgttactaaatgctcaacacgtcatattcgatgttaaagctatctttgaaaaaaacgttgtagatggtagactctaatcggattgtctcctttgacatattgaaagggggaggaattttattggtcatccttggtcatatacaaatcccttacatgttgaaaaccgttatttacagttttcacatgccccttttcttttttgtgtcaggctgtttctttcgtccaatcagtttgagagagttttttgcaaaaaagaccagacaattactgattccttgggccttttttgcctttttgttgttcgcatatttgttcgttttgaaacttaacgaaactcataattgggcaaaagcgatctcgctccctgtaacgagtatgtttgatggttttctcggtgatgaaaactcttttattttatttcatgtaatttggtttttaatttgtttgttcgaggtttcattcgtttatttattgatacataaaatcacccctacaataaagcattaacaatcagcgcattatgtatattattatatggagtaggatattggttaaatgctaataacattgatttgccatattttattgacacaacaatgtctaccttgatttattaccatcttggtttttgcttcatgcggaacaaatggtacggcatgaaggtttcaccgatatactcattattcttgcttattatcgccattgttttcatcgttctatttccctcttacgttgacttaaaatcaaacaattttccattgcatctattgttgctttcaatggtttttattatgaatttttattggtttatcaattcatattttaattcgagaaagctgaaacttattccattggataaaatattgatttggtgtggaattaacagtttggcattattggggctacatatattatttgtagatacattctggatcgtgcgcaataagttacatcttgtaaactacagttggaccatattggaatttgcactcattgttgcaatatgctattttgcgacaaccttaataaaaagatacattccgtctgtattaggaagatcataagcttgctatgaataagacatcgtccgtaaataataaaaaaatattcaagaatacagtggcactttatgcacgtatgttgctgtccatgattgtatcactatatacatcacggatcgtgttaaatgcacttggtgtagatgattatggcatttatggacttgtcggcggtattgttgtcctatttagctttttgaatgtaacgatgagtggagcgacttcacgctttcttacagtcgaacttgccaaaaatgaccctcgacaactccaacaaacattcaatacagcctttatattacatataggaattgcaattatagtcttgtttttggctgaaacggtcggactttggctgttattcgaaaaattgaacattccagatgagagaatgagtgcagctgtttgggtgtatcaattttcaataatttcctcaatggtcagcatcactcaagttccatacaatgcgactcttatttcgcacgaaaaaatggacgtgtatgctattgtggaaattgttggatcactgttgaagttgctgatcgctacacttctacttattacagtatgtgataagctcattttatatggaggacttatgctcttatcttcattcttgattgcaatgacatatcgcatttattgcattaggcattatgacgaatgccggattaattgggaatggaataaggttatcggccgttctctgtttagcttttcaggatggaatctttattccaatatttgctttactactcgtcaacagggaacaaatatgttgcttaatatatttggcagtacagctgttaatgccgcagccggattggcaacaactgtgcaactgatgattgaacaagtatcaaccaatttggtaatggcttcgaggccgcaaattataaagcaatacgcattgaccgatttcaatgccatgatacaattactaaagcaaactacttgtttggcaaatgtgttatatctgttggttgctattccttttatctctgaaatacattatgtaatgaatttatggctcgtggaagttcctccatatacaattgaattctgtattttattgatagtctcaagcttcatatcattgaataataatattatatatattggaatacaagctgtcggacgtttgaaattttattcatttatggcggggacagtatcattatcagtcattccgatactttggttattgtttagtaaaggtatcggcttgacttgggcttttggattgcctatagtgagcacattattgatttatatcgtttgctcatatacactccatcattatgttgaagatttcaaaccgatacgttttttcttcacaacgatggtagtgaatcttttcataagtattccttcttttaccgcaatcctactcatacaacatatcttggttgagtcctttacaagagtgattatcgtggctcttagttcttcaataatattggttgttctgtcctattatgtgctattagacaaagaaaataagaaaaaagtaaaagcattgattttaaacaaattaaaacgatgaataaaaacatacttataattactcctttttttccgccacagactcatgctgcggtatttagggcatttaaacttgtaaaatatcttaaacgtacaggttggaatccgatagtactgacggttaatcgtaattatctatatttagaagatcctgatttgttggacgaagtccaagacgtgcctatttatcaagccaattatatagaaccgacattgcgcggccttagaatgttgcttggaggagaagatacttcactcaaagccattacagccaaagcaaaaactattggtgcacagtcaaaaagcacggatacagtcacctctaacaagcaatctttattcggtaagttttataaatatatactagaccgatggattcaagttcccgaccgctttagattctgggaaagaagtgccgtgaggatgggacgaaaaataattaaagaacatgatatatctatcatatataccacttgcctgccttttacctcaaatagaatcggtatgcgacttaaacatctaaccggagtaaaatgggttgctgatttcagggatcctaccacatacgctaagcgaatgtattctgattattttcctgtttttgccaagcaaaagaaaattgaacaagatacttttaaatacgctgatgctattactggtctgtcgggagcatacctgaatatatttaatgatttatatgagggacgatactcaaataaatcatattttattccaactggagtagatgatgattatttgccttcttttcaaaatagagaaaaagagaattatataatattcgtgggtgaatacctccatgaatataaagataatttcttgaaaatatttgccgaagctgtcaattctaaggaattaaaaggcaagggttgcacccttaaaattgtgggtaataagaatatcaatcaaaaacaaacggaagaatttgtcaatgatttgggaatctgtaacaacgtggaatatatcaatcatgtaccgcagcgtaaattgtatgaattgatagttaatgcaaaagcagcagtacttattcccggacacacggctttatggtggactaatttcgcaaaaatggtcgattatatcgcattacaagtgcctgtattagcaatggtgcccatgactagcgaagcacgaaccgaattgataaaagcaggcataggtatttttatagatactcctcagcaaggtgttactgtcatcaaacaagtatttagcgaaaaatttccaatgacggcaaacaaagaatattgccgccgttacttggcatcgcaacaaacaaaatctttcattgatattttccaaaaaatacaatagagatgcatatagcgtttttaactacagaatatccgatattgggtatgaaatgtggcggaatcggaatttttatcaaacatttgtctcatcttatcgttaagagtgagactggtgtgaaggtatcagttgtgtattggggcaataagtttacagaaactgtgtgggacgatggtatatctgtgatacctataaaccagcctcataagtctccattttcttcttttatcaatagaaggtatctaaataaaaagttaaatctattagtggcaaagattggcatcgacctcgttgaatctatcgactgggagggacctttggctttttgtagtttatctgtaccagtagttacaagattacatggttcaaatgtgtatttcgatcatttgtctggaaacaaaactccatggaacgtacggcttatggaatataatgctttgcgtaattctgatgcctatataggagttagccgacaggctctcgacctgacggataaattattcagtctgtcttcgaataagagaaaatgtgtaatatataatcctgtggatataaacatgccccctctttcatctagtgacatgaacaaaaatacaataacgatactttattgggggacaattgttgagaaaaagggggtacttgatttgcctcttattttcaacaggatatgcgagcaaaacgacaatgtcaaactcattctcatcggacaggatgcagtagtgaatggttcttcgacatgggaaaaatgcaaatctctcttttcaaagcaatcgatcggttgtgtatcgtatttaggtcgcttaccttatgacaagactatgtcatacgctaacagtgccgatatttgcatatttccaagccatgcagaaactttcggtttggtcttactggaggcaatgttactgcggaaggcaattgtttgttccgatatcgattgttttcaagagattataggagacagtaactgtgtttgcaaatgcagggtgaaacgtatcgatgaatttgcagaggctttgcaacggctaatctcgaatcccatttataggtgtgaacaagccgacagggcttatctaaatgcaactgctagattcaacaccaacgagatagtggcacaaaacatcgaattttacaatcgagttataagagatagctccaaacatcatgtagaagaatcctaactcaactgctttattagaaaatttaaacggactttttatttataaaatcacatattcatacgaaggggagttaaggctttttttgtattgccatcttgaagaaagtcaaacatttcagtacaactacgtaaaatatagaaatgcttcattatagtgaaatttctgatagagtataattcctaaacgaagtgattaatttcttaactcttgattcatattattcataaacgccttatgcaaaaagggataagcattattttgcccacacttaatcgggctgattatctggcaagtacagttgattgcttaatagagcaagattttggggagccgtatgaaataattattgtagaccaatcggcagccattgacagtactatgtatagtcgtgcaaaagatagtgatacattgattaagtactatcatgtgactgaatttagagggctacctgaagctcgtaatttcggtgtgcaacacacacaatacgcctacatcctatttctagatgatgatatcgagtgtgactgcaacctgctcaaagagcattacaagttcttgtcacaacctgatatcgcagtagtggcagggggaattacagaaaaatataagaataatcccaaatcgaaaaatgtaggcaagttccatttctatacggcaactccagaacggggattccacattaatcataaagaatatgtagatcatggcggaggtggaaattatagcataaaaaaagacatatttttagaagttggtggtgttgatgaatatttgaattatggagctgctctatatgaagaaaccgaaatatgtttacgagtaaaggaacttggatacaaagttttttttaattatgatgctcatgtatggcacttggctgctgatacaggcggttgcagggttctggatatcaatcgctatattgcttcattagtacataaccgggctttattgattagccgtcatctcaaatggtatcataggccgactgcttacatctatttgttgcgtcttgttgcatcatacgcttttacttaccgcaatcccggactgtttagactttttgcaaaaacttataaagaaggttataaaaaaggaaaactaactcctaaatatactcattatgcaaacatctaacaaacacatttttattgtaacctatgattatccaccaagtaatggtggtattgcaaggctttgttttgaactgaaaaaatatttagagaaaaaaggactgaatgttacagtcatttgtccccaaagtacttctaccgatgcagaggaggataataatgtggtgagattgcatggaagaagaggaatattggagttgcgtacattgaagtatttacgcaaaaaaactgttcccggtgatattgtaattaccgggaattatcatccagagggaatgctgtctctattgtcaaacagagaaacctatatattggcacatggagccgaatatcttgccggaaagagttttttccgacgctgtatttggcctacttatcgacgttttatactaagaaacgcctcttgcgtgattgctaacagtcattatacagagacattagtaaaacattgttctccaaatgctaaaacaatcgctattccgttagcggttgatgcaattcattttcgccctacttgtgaaaaatataaggatggcttgctacacctctgttctatttctcgattggaaaaatttaaaggacatgattttattatccggacgatagcttctttaccggcaaagtataagcaacaagtgcgattgcatctcggaggtaaaggaaaatataagagtgcacttgagcggatggttaccgatttaggattgtcagatattgtatcatttgaaggtttcattgatgataataaactttgcgatttctattcagcctcgcatatattcattctctgtacacgtgaagaagcggataataggaatgtagaaggatacgggcttgtttttgccgaagcgcaagcttgtggaaccgccgttataggtactcgtacaggtggcattcccgatgctgtcgaggagaataatggcggttggttgatacatcaggacgcccacgaagaattggagaatttactcattaagttaatcgacgataaatctcttgctataaatgaaggtcgtaatgcacgtcggcgcatagaagctaaaattacgtgggaacattatgtggaccaaatttgtgatgtcattttatgagtattagtctatatatagccttatattacaacttgttgctgctattagttgtttacatcgctattcaaccggtcagggcagaaacagtaagacagccttatatcaacaaccagatatttagccttgctttactcttgattgtatatgttcatgtaactttccgaccgaccgattatcactactttggagatacttcagcttatgccatggctttccaaaagaaagccttctatggtacggttgctataagagatagagatattggttttgagtatcttacctattggctttcacaactcgtcaatttaaaagggtattggtttgttctttgctcattatatatattgcctgttttctttgctttaaagaaacgattcaaacaacaatatgctgtagcactagtgttgttcgtttgttctttgagtttttggggatacggagtaaatggactgcgtaacggaatagctacatcgttagttatcttctcttttcttgttccaaacaacgatattaaacgaattcctgtttggattatagcatgtcttttccatcaatccgtcatgttgccaattggctgtttcttgctgacccgactttcaaataatcccaaacactacttatacttatggggaacgtttttcctgcttatgcttgttgcacgtgattctttctccactttgttgacaaacattccttggtttgaacaggataaaaggatgtctgaatatttgaatacgtcttataaaggcatggagcaaatgttctctaatattggatttcgctgggacttcattatttatagtttgatacccattatcgcaggagtgaaatatatctatacatattgctacgaagacaaattgtttatccgtttatttaatacttatatagcaagtaatgcgttctggctattgaccattcatgtaccgtataataacagatttgcttatctatcttggtttctttatcctatagtattgatatatcccttgctaaaagataacttaataaataaccagggagaacgaataaaatggattattctatgttattatatgttcacttatgtaatgtggataaaataaaatacaaaacaatagaaaaagatttttatgaaagatttagttactgtatttacaccggtttataataggaagaatttaattggaaatctatatcagagtttgttgtctcaaacctataaaaattttgaatggattattgttgacgatgggagcactgatgatattgatgaaattataaaatcttatcaaaatgaagatcgtatattaattcgtttcatcaaacaagagaatggtggaaaacatagagcaatcaacaatggcgtattacatgcaaaaggagaattattttatattgtagatagtgatgactatttaacaaaagactctatagaacgaatagtttttcattatcaatatataaagaataatgataaatttgctggagtttgtggtatgaaatgctttccagatggttctcgtatagggaaagaggttacatggaaaattttaaaagattcttggattaactattggattataaaaaatataaaaggggatgttgcgtttgtttttaaaacatcagtcctgagaaattatttatttgacgatatacccggagaaaaattttgtgcagaaagtttggttctaaaccgtattggaaaaaattaccttatgttattttttaatgaaaaaatatacatcgcagagtatttatcagacggtttatctgtttcatcaatcaaaaacagaatgaattcacctaattatgccatgagaatttattcagaaatggcatcactagataatccatatttaaaaacaataaaagctcatataaattactggcgttttgctccttgctctaaattgaaaatgaaaaataaaataaaacaaataggaatttctagttatattatttttatgcctattggctatttgtttcatatgaaagataaaaaaaacaattatatagatattagacatgtcggatctaagcggtagaactttatttaaacggattaaaccattaattaaggtattcgttatagtagattcatatcttcctaggaaacttaataattttttatttgtaagtttaagaggtattggaggaaaagttggtattgtgattagatacatattggtgaaaaatctagcaaaaaaatgcggtgataatgttgtaattaaagaaaatgtatatatatctaacatagagaaactagaactgggagataatatcagtattcatccgatgtgttattttgaatgtagcggaggattgatgatcggaaataatgtgtctattgcccattcaagttcaatactaacaagtactcacacttattctgattttaatttacctattaaatataatgaaatcctaaaaaaaacggtagttatccatgatgatgtatggattggttgtggagtgaggattttatgtggagttcacattgatacaagatgtataataggcgcaaatagtttggttaataaaagtgttgactcattctctatttatgggggagttcctgcaaaaaaaataaaatcttttcaatgaaaaaaaagaaattattcaaaataacaaattcagcttattttcaagtccggcaacttcaaggtcaattgaattatttttccgcatatttcgatgtcattgccgttgcccctaaaggagaaggttgggaggaattacagaagcaacaggcacgttgtattccggtaaaaatgtcaagagccataaatccgattttcgatttaataactcttttccaattggtaaaactttttatcaaagagaagccgactattgttcactcgcacacccccaaagctggtcttttgggtatgttagcagcatggatagcacgtgtgccgatccgtatgcacacggtaacaggcttcccattgacgacggctacgggcataaaaaaacaaattcttcgttttacggaacggttaacttacgcttgtgccacaaatgtatatcccaattcacaaaagatgtgtgatattatttgttcaatggggatcggcaatcctaaaaaaatgcttgttatcggtaatggtggttcaaatggaattgatacggcattctattcgcgaaatgctacacaagatattaagatttcaactttcgatttcacgtttggttttgtaggtcgtatattttatgagaaaggaatcaatgaattagtagcttcttttattcgattacagaaagattatcctaacataggattacgtttaatcggctttatggaagaaaacctttatccggttgatgattgggtaaaacaagagattagcacaaattctcacattgagtttgtcggctttcaacaagatgttcgtccctatctaatggggtgtgaggcttttgtttttccctcctatcgtgaaggtttccctaatgttgtcatgcaagctggggccttggaattaccacaaatcgttacagatatcaatggttgtaatgaaataattgttcaaaacaaaaatggaataattgttccaccacaagacgaacacgcattgtataaagccatgaaatattttttggataatcctaatgaggtaaaaagaatggcaaagaatgcaagggcaatgattacatcacgttacgaacgcaataaattttggaaattgatgcttgaagaatactatcggcaaattaaaaatcgaattaaataacatctatgcaaatcatactgttatccggcggttctggtaaacgcctatggccgctttccaataatacacggtcaaaacaatttatcaaactgttgactgcgcccgatggctcgaaagagtcgatggtgcagcgggtggtacggcaattacgagaaaccggcatctgtgattcgattactgtggcaacaagccagtcacaacgggatatcatcatcaaccagcttggagaagagattcctgtagttacggaaccggagcgtcgcgatacattcccggctatcgctctcgcaagctcgtatttggcctacaaacgaaaatgttccaccgatgagattataatcgtcatgccttgcgacccttataccgaaacaggttattttgaaacgattcgcaggatagcggatgcagtgaaaaacaatgtagccgaactagtattgatgggaattaaccccacatatccgtcagcaaaatacggatatgtagtgccagtcaatgatgtacagaacaaaggaatatttcaagtatcacgctttacggaaaagccagatatgataactgccgagaaacttatttcagagggtgctttctggaacggaggcgtattcgcttttcggttggggtatatgacagatattgtaacccgacacatcaaaaccgacactttttcagaaattcgttctcgctatggggaatttccgaaaatcagttttgactacgaagtcgctgaaaaagcgcagtcggtagccgtcgtaccttttgccggagagtggaaagaccttggtacatggaatacgttgactgatgaactatcggaacacaccatgggcaatgttgtcatggatgaagaatccgaaaatacccacgtcatcaacgaacttggactgccaatcatgtgcattggcacacggaatctagttatcgcagcatcaaatgatggaatcctaatttcggacaaagataaaagcgagaacatcaaaacttacgctgactgcctacaacatcggccaatgttcgaagaacgtcgctggggtgaatacaaagttgtcgataccgccgagttttccgacggttacaaatcacttaccaagcaactgaaaatcaaatccggtaagagtatcagctatcaggtacaccgccatcgcgatgaagtctggacgtttatcgacggcgagggagaactggtactcgatgatatcaggtcggttatcagcagaggcgatacgattacaatcaagaaaggtgttaaacatgcagtcagggctatctctgaattgacgttcatcgaggtgcagtccggaaatctacttgcagaagaagacattgaacaatttgactataaatggtaaaatccttcgttaaaacctctgacaaaagaatgaagttggtttacaagaaagttatcgaacctcaattaggcaacctgatatccatattgaaaaagaaatgataatctatagcattgattattatcaacaagatcaagattgtactcaatgtggaaaacattcggaatgtatttgccggtaaaatgataaaatatcactatccatatgtaagtaagtatatataccggacacaggatcttgcgaaagtagcttcgttttcagattctaaaccgcagaaacagcattacgcaaaaattaatgggttggaaaaacttattataaatactggtaatgaaccttttcattgatttttctaatgaaaaagaccatccttcaatacatgaccgatatctatcaggaagatattcccaaacatatccttcaagaaaacaagatacgcctgaattcttttttcctggaacaggaatccgtacagaagaaagggactcagtttatattcagatatgcattctactccgttgagaaaccccgaaagatcacgaagcagcatctattgaaagaatatgcaggggtgcctttggaaaaaaggagcgtacaaccggaacaaatacccgatatgaagcaatatagtgatataatactgtatggagatgccagctctcctgaagcacagcaacagctggcggaatacctccaacaacataattcattaaaagtccagttgtctttttttgacaagagaaatgattccactagcaaggatgaacaagccatcgcatatgcggaactacagaaggcgctatttttttgccaaagaaaaaagatacctctcctgttcgtttccttaaaagggatgatagacgacatccgttttctcaatctgctggaggagagccatgtcgatttcagatgtatcgattttccatggttctgcaaggagaatctgcctctgataaaggcagttgtgctatatgaaaagttggaaataagaataaatgtataagatatcaagcttacagattggacttcaatgttgcagcattgaggtttatgagaaacaattctaaatatatttctgtttggcgaaatcttattctaaaaggaactctaaataaaagaatccaccttcagatatctttcttcacttatcctcaaagtatataatccaaacataaatatcagacctattttccctataactgagtaataaaaagattattccccaacaccgtaaacaaagaaataacagaagcactttaaaatggtgtatctaactcacttttttaaggataatatccctgttacagttatctgtagcaggtgatcctttcaaattgggcattagatgcacccttttccttattccaacaaatgcgcctcttgtaacctcaccaattcccaatacatcttcaaaaacatctccagatacaccttcagactcgggaaatagacgaaagacttccagcaaaagaaaggcacatgaatggccgttcattcggaacctccatttctggatagcgtttctttgtccatccaaaataatctctatcgggacagaacaataaacaaaagcataaatatcaggcaaaattgtcccgataaaagaattataacatgactattgaagatgaaatcctccaatacctgcactatcatcctctatcaaacagggttgagataacgcttgggataaccaatcctcccagtggcaggattgtaaaaagactactggccgatgccgtaaccaaaggaatgatagaagtactctaacaatagtagtgccactattttataagcagcactgcaattgttccttaccccagcaaatgcacctcctgtaacctcaccaaccccaaatacatcttcaagaacacctcctgatacaccttcagatccgggaaatagacgaaagacttccgggcaaaagagaggcacgtgaatggccgttcattcggaacctccatttccggatagcgtttcttcgcctggtcaaccgccatcttgttcagtgaagccacgaagttagcctggcgtatcggattccatttcggggtttcaagaatcaccatcccatctttccgctcaggaataaccaaatattcatcctgcacgttacggacgtaatagcacacaaaagacaaggcctcatagacattatcccctacatgaataccgataacccgttcttcaaccggtgtaccggcaaagcattccgcaatctgtttcatggcatacccatgcaacaaggcagcatcagaagccaacagataagccggtgcggtacgctctcctcccttatcgatggcagcaaagacagaaggactccaacagagatggatgagctttcctttttctttctcacgaagggaagcgacacataaacggttatcaaagaccaaacgggcttctttcgtttccggatggaactggaacacgttccgtaccctgtccggcttatggatatccatcatcagatagccctgccaaccggacacgtgctttgtcttcaagacggtttcgctttcctccacatcgaaaagataagacaagagcttttctcgcttacaacatacgaagagagaaagctcgtcctgttctttcatctgctgcatatccaaggaaagaacaaaagccaattgccaaggagtaagctcggaaaagccatgtaattcaatacaagacaacgcatccttctccggtgagtaaacgacatatccccggccacctatctcatatctcaacatgaaatccccctgttcagtgggatgataattctgtaaaacggtctgataattcataaagcaaatatattaagttagtattcatcataatgagaaatcgggaccactcttgcgtttccgtttctttttggacggtatgagatcatcctcttgcgacttcttcccgctgccggtaatgtcaagttccggaatggccataactcccccaccctgcatatagaaagcctcacgatccacccgctcacggaactcccctaccctatcgatatgtggcgagagaccgacagccacaccatcgaaatgcttctggatattctgataagtgagcttacgggaaagatccgcacctttaaagacatgagcattttccacgttttccatataaaaggaaatcccgtatgcgcctttgctgtttacatgttccgtcacacggatcgattcttccgccaaccttttcttaaaatcctcatagcctaaagaagcgttcaatgccttaaacacatggtcatagagataatgcttctgttcatcggcgctcatgccccggccatcaaaacgaatattaccaaaacgatatttctgaggaagtgaaacgtccttcaggtaaaagcctgaatccttgatgccatagacataataggatttgtccttcttggtgaccagacgcatatacaatccttcttgttccaggttccttcggaaatcggatgtactttcggaaaaagagtagatgcggtcaagctgttgtaacagttcatccttgaacaaggggttgaaaaaacctcctttttccagcaatgcgaaaaggttgtcatagctttcatcccccaataggacacgccattcttcattggccaattttatttcttgcaagggtttattcaaagaccggtatgtatcggattgttccaggacagccgataccttatccttgtaattataactacgcatggctttcttcaaggccgcatcgaaataatagttacggtattgcgcctctcccaacgtggttctcttgcctccttccctttccaaaggcaacagaccgtacttctgctccagttcccttgagatcttttcggaacggctgtaattatttccggaaggaatgcttttgccttcttcatcaattgtggtcagcagcacatgcacatggctgtgtgccttgtcggtatttaggacaacggcataacaggactttccgtaccccatcctctcgatatattccccggcaagagaaagccactgttcatcggaaaggctttctcccggatagaggctcagaataaattccgcataaggtagtttcacccggtcattcaactgggagataagtttcatgtaggctggcatggcggccagttcgtcaccagtggaggtgtaaagcacttttccgtttccttccttgaccttggaaagctggtattcaattttccggctcatggacaggtgggatgagaaagaaggttgtatctcggctatcataacaatttccggttaatggtttctacatccgaaaggtattggttaatccgatccaatgaatacaatatattttcatcggacggaagcgtattgatatgtttggcaagctggttgatattggctcctattttacgaagttcatatatcatttgcacatcggttttcgatatgcttctgcctttcaaggcagactctctgataaaggaagaaagggattttccctcttcctttgaacgttgaagaagctgttctttctcggcttccgtcaagcggatctttatacttatatctcgattctctttcatatatacagagtatgtgagtgtaacgaacattggtcggcagctcggctgtcgcaaggttttttgtacccacaaaaacataccttgcattagcaaagatatacaataatactcagctgtgaaacaaaaccagacaaaagtcttgatttcttaatccagattaaccgctcactttgttacaaagtaactacgcacattgtaacaggcgaacggaaagccattagttacaaaatacataattactaattatattattacaaagtatgaacatacatacttaattataagattaagtatgtacatatttatatttatatttatatatgtaattacttatacaattaagtaaaaaagtgtataataaattaattataaaagtatgcaattatttaatttattatttatatatttgcgcacatacttaaaaacgtacattatgggacaaatattaccaggagtagtcgtagcttttgagaatcccaagggcggggtagggaagtctacgctgacagctttgtttgcaggttatattcattcgcagtcaaacgaagaggggggcttatccattgccgtggtggatatcgacgacatgcagaacactatcggaaaattacgtgaggacgaagccgaggacggaatcatgaaaaaggaagaagaatatgaggttatcaatatctcttcctcagagttcatcaaccaactggatttccttcaggacaattacgacattatacttgtcgattttccgggtaacctgaaacaaaacggtgtagttgaaacgctgcacttcgttgacgtgatcatcattcccttcgaaccgaaccagaccgatttaagacctacattgaccttttactataacatctatgaagggattatcgaaagccgtcgaaagattggtaaaaagactaccgtgcgtggtgttatgaaccgtgttcttccgaatgtgctggagttcaaagaaattttgaaaaataaaaaaaccttgcctttcgagttgatgcaaaactacatcaaggattcaagggttgactatcaacgcaatttaagtacgctgagtaaagcgtaccatcatccctgtgatgctttctgtgaagaggtattggaattaatctgtaaccatataggagaataaagctatggcaaccaacaaagaaaggacatcatcagccgccatgagaaaactcttgctgcaaagcgccagtaagaaagagcaggaaatccagcagatcggaagtgttgcggaaagcactatcccccaacctgcgattgagcaccccatccatgaagaggtgaaagaatcggctccagtcaaagaaaccgtccaagaacctcagccggaacaaatggaaaagccggaatccaaaccttccgtgcagtcttctccaaaaacagaagaaagcaaagtctgcggaaaaaaattctcggaatatctggaagagcgaaaattaaagaacaccgaagtaatccggatatccagcgaaacccacagaaagctgaagcagattgctatggccactggattaggaatgcacaacatcgcaaacaacattcttgaagacatattgaccagccataacaaggagattcaagcgatactgaagaagtatatgagcatctgattctactttcggaaaaatatatacgcctgttcgactgcatccgtcgggcaggcgttatttttgcacaccgttttagtgaaggccggcattgaaccgggacacttttacacaactgcggaaaaatccctttgcctattatcctggacaatatgttaaagaattcaaacctctacttgtttccacctcaaaattttttccgaaagtaagaatacggtaacaaaatcatttcttcgttttatttaggtttttagggatttaagtatttgtgggacacttttacacaactaataagggaggttttccgtataatcaactatattattgcaagttagcacttactggcatcttctcgtaaccgggacacttctgcacaactaaccgactattcgggacacttctgcacaactgaacaggaaagtcgggatacttttacacaactagaatctgcattcgggacacttttacacaactaaatcaggaatccgggacacttctgcacaactaaaccggccattcgggacacttttacacaactgggggatcggaaacagccgtagtcgggacacttttacacaactaaatcaagaaacagcacgaaaaaaatgctttggaatcttcatttatagggagttagattcactatctccgtaaaaaaacgtatctttgcatcagtaaacaacaagtgtccgcctatgaaggaaagtaatacacaaaaagagttgagcagagtccccaggactctcagcgagtcttccaacacgaaagtattggaagttctatttgatgcaggcggcactgtcatgtctgacattatcatttacgtggcatcttcacaaatgaaagatctgttcggcgactgctggttctccatcaacgatttttgtgaggtcatggggtatgaacgaaccaagttgcaacgaaaactgaccgagaagcagcttgatttcctgttcagcaaccaacgtccggtatatatcaccgaacagaacggccaaaagatagagcatccgatagagaacacctttgaagcggcgttataccgtttagggacatccaacctcagtgtagcatacgccatgaacggcaagacgcaatataagttcattcaaatactggaccgctttgagataaaggataacttcggcacgaaaaagcgcaccaagcggaattacaacgtgcatctgagcaaagatctgatgaatactttgcttaccgaatacaatctgctggaactgaaagactaccgtaacctgcccaaccgcaaaggctaccgcaagttttatctgaacctggcgaaaatgatttacctgatcaagtataagattgaccaaggacaagcaccttatttcaccgttacggttgaccaacttgccaaggaatttgatgtaacggtaaaggacaaccatgaccggaagaagaaggtgaccagcatcttaaacggtatcaacaaaaagctggagagaaccaaattccaataccagtacatcaaaggaaaaggggagaagtggccctacaccgtacagtttttctttgaccaggaaacattggaatatttcgacgaaaagataaaggcgatactgacctcgcaatatcacgatgcgcttaaatcatgcttcttgttaaacaagaaaggcattcccgtgagcagacattatcaatataaggatttctttaaattgggaaccggcgaatattatcatgaatttaccgcatggctttattctgaagaggacaaggagattaaggagaacatctaccgggatatctatataaaggtagtaggcattcgtccagaagaccttgccgtcaacttaaatccctaaaagttggaacaaaaaccataaaatagtatctttgcagcggattgtcagaaaattggcagcccgctttttacatacgtccgtctgtctaacaaaagagtggcatctatcgttaaggaattaacaacaacaggcgcatgcctgtaccagtatgaaactggtacggggcgtgcctttgttgttggaacgccacgtccatgttagagggtacgtttccgtacccttatataaacataaaacaaattcaatggttcaaacaattgccaccctgatagatgagacgctcatggtaatgggcgcccatcttcacgtgcggatgacagacgaagaaaaggcgtatcttgatgctcatttcgagcttatccatatcaaaaagggagaacacctcgtcaccaggggcgaggaagtatgctacctctattatctggaatccggcatcgtccggttatggtttccggacaaagagaatagagagatttcagcacggtttatccaagccaaagagttcatcaattttttcctttcacatgaagaacaccatgcccactacaatatcaaggcattggagccatgcaagatctggagattgcccaaaaaagatcttcatcagctatatgagttatccatcaatttcaacaagctggccagaatacatttggtaagatccatcaaccgcaaaataataagggaagaggagttttacacactggatgccgaagcgcgttacaaagcgcttttggccaatgaaaaatggctgttacgttcaatacccttaaaagacatagcaagttatatcggcatcacgccacaagcattgagcaacatccgaaagcgcatataaaccaaaccctataagccgggcaggacagttttacacaactaatcctatccggcttttttctgtagaattattccacacctgccggtttacggcacatgtattttttaatgcacattaaataaacacgaaaggccctttaaaagcccttcataaaatttgtcctcccgtatataatctatatgtttggagcgaaaacaacgcgataagcaccttgattcggttctgccgacaggaatccgcgtaaattggaaacaccgtatgagacaaatagaaaaatatataacattaataacctaaagagtaattcccatggaacacatcagactgactgctatcagccttagcctgctgttatgcaccgtaagcgcttttgcgcaacgccattatgagaacatcccggcacttgaattgaactacggcactaacctgttcggcaatgcaggcaactattacaacctgtccttttccagatacatcaaccggacaagctattggaaagccgggtttagctattttgagaaaccttacgaatatacagccaacctaccgcaagtctctaccttgaacccggaagaaacgattcccgaaacgatacatgacaagggtaaggacttttttgtggacggcggttattacagaaccctggcctgcaacctgaaatccgtttactggggcatcggcctgggaggattcatcggtacagaatacgtccgccaccccgataaggaatacaacttcatcatcggcccgaaactggaaacggaactggaagtattcatcctgccccgaacggcattgcttgcccgcatacaacaacattggaatcccctatccattgacaagtggaacactgtctggaacgtaggaataaagatactgctctactaaccgacaaatcatatcaccatgcttattatcatattgttagccgatacaaatgtatccggcctgatctccttataccgtgaaataggcgccatgctgataggggtaggctttctatgtgccggactagcggtacttaaaaagctgataagcaaccacgagcgcaccaaagaggccatcatcacctatatcacggcattggtcacttggctcattatctggcaactcttatgaacgtagtggatttgatactggttgccatactcgcctgtgtcacgcttcacttttactttcggaaaaagaagaaagcactttcttccggaaaggagaaagagaagccgataagggaggcggtgcgcaaggaagggcaggagagagcctgtccggtcatctgcgtggtatttcagcctgagctggaagaagaggaattggctgccgagatagccgatatgtacctgcatggaagagcctactactactcaggcaaaccactgccggaacagccgaaagaagagcccatatccatcaagtataaggatgtgcaatgggagagactgaaaacgattcatgtttaattaaaaaataggaacaaaatgaaagcaatcgaaaatgtaagagaaaaagcgaaccaagtcattaaccgctatggaaaggttatcttcacctttctcatattcttcacgctgttgggaacggcacaagtggcggaggcacaaagcggcctgaagattaacagcctatccgaagtgacagacaaagccaaagagggtgcggacaccattctggacgtagccaaatacattttggcggcggtactcggcatcgctctggtctttgtcatctattcgcttgccacgaacaatccccatgccaaggaatacctgctcggctggatcatcgccgtggtagtcatcatggtagccttcctgattatctaaaaacgaagagccatgagaaccatgcgtaaaatcaacaagccgatcaagttcttcggtctgtcatcgggacagttcgccatcttcatgctgctgacggccatcatcatcatcgtgagcatattcaagcagctgcacccgatactcatcatcggaatcatttccgccattctgtttctatccggtctgctgttccaaaccttgaaaaaggaacacaaggccggtaacccggactacctgaccggcctccggatcaagaacgccaccccccggcagataacggacaaacggcagattttcaaattcatcctaaaacagcaaccatgataggaatcatcatactcatatccctgctaatctgtgcgctgtgcctgctgattgctctgctgtatatccggcagacagagatagaggtgaaggacaaatccgtggatctggaaagtgtcttgcctatccagaccatcacggagaacgccgtcatcaacgggaacggtgacatcaccgtcggctaccggctgcttctgcccgaagtgttcaccttgtcggaaagcgaggcgcaatacatccatgagcggttggaggctcttttgaagctgcttccggcaggcacggtcatccatcagcagaatttctactatacggggcgataccatcatgcagaatactcttccaatgccctgatagcggagaacaaccgtcatttcaacggcaaggagatactgaacagttacaccaacctgtatgtgacgttcacgaacggcagccgaaacggtaagatacgcaaaagcgcatcgggcacctcgctgatgcgaaagctgcactacccgttcaagcaaccttataaggaatatcagcaacggctgacagaaatggaagcctttctgatgaactttgagaacggtttgtcgtccatccagcagtttgagatacgcaagatggatgatacggaactgaacaacgccatctacgactacgtcaacctctcttacgagacaccggaaaacgatgccacgcagaagagcgtcaaccctatggctgtcagtgaaagcggaagcatgaaaatagggcagcagcacgtttccatcctttcgctgaccaacgaaggcgagcatcttcaggaactggccgtgccgcacaccggcaagtcgaaggcatacgggggaaacatagagataccggacagcatacggagcaaatgctcgatgctgtaccccgtaggacttggcctgccgttcaaccacatcgtaaacatcgtgatagagataaccgatccagatgccaccgtaacggccatcggtgcggagaaagacgcgctgaactacatcaccaacttctaccctccggcggcagagaagcaacgcgagcaggcagccttctgcgatgagattacccagttcgactaccagaccgcctataccgccttcaatgtcgtgctgaacgatacagaccgcacctcgctcatgcggaaaaccgcactggtacagcaaggcttcagctttatgaaccaaagttcgtgctatgtggagaacgccgagctgtgcaacctgttcttctgcaacatacccggcaatgccagggccaattaccggggcttcgtcaacacgaccaagcaggccatctgctatctgcaaaaagaggggatgtacctttcggacgagaaagggcatatctaccatgaccgtttcggtactcccgccaagataaacctctgggattatccggcgctgaacaacaagaaccgcatcgttatcggcccgtccggttccggtaaatctttctggctgaacaattacatcctgcaaagctatgagctgggccgggatgtgatgatcattgacatcggcggctcttaccgctcgatgatagccttgaaccggggcaaatacttcgactctaccgagcagaagaaatttgcgttcaaccccttcttgtgtgaccgtgacaagaacggcaaatacctgtacatcgacaccacggatgccgagtctgccgatgaccagataaagaccatcgtcgccattatcagctacatttggaaggtacgtgaacccatgctgcctgccgaaaacgccattctcaggaaatccgtcatcggattttacgactatgtgaacaattcttcaataggagagaagcatgagcgtatcttcccgacgctgataacttaccgggcttatctgaaggaagtgttcagcaaacggatgaccgagtttgagaaacagaaattcgagatagaggagctgttgcttttactggaaccctatacggacggagagctgtcattcctgctgaacgctaccgagaacgtggatatcgtgcatgaccggctgatagccttcgatatggaagatgcctctaagaaagagtactttccactcgttgccatcatcaccctgcaaatgatcgtggataaaatcaagaaacgccaggggtttgccaaagagctaatcatcgacgaagcactcgacttcctgcaagacgagaaattcggagacttcatcgcctacctgtaccgaaccttccgtaaaaaggagggaagcatcacgctggccgcacagaacatcctgtttttgaaaaacatgccgtccagtatcaaggactccatcatcatcaactgcgcgaccaagattatcctcgaccattcagaacaccggcagaacctgccggaagtgaaagccgtgctttccatcacggacgaagaggcctatatgatcgagtcgttgcagcgcacggaacgctggagagagtttttcatcaagatgtcgaacgatgccttcatcttccgcaacgaggtgtccgacttcgccgccgtagccttcgattcgcgccaggcgacagtagtacgactgaagcagttgttcaacgaaagcggctcgacctatacggccatcaaccgctatctggaggaaaggaggaaaaagtatggatgacgccacccaagggctgaccgcccttctaggctggtcaaccgacttcaacggcagcgcatacaatcttgccggaagcattgccgccgcacttttgggcgttgcgctcattttcgtggtatgggcactcgccacgaaaaaggaaaatgccaagagctatctgacagcctggctggtatgtgtcatattcaccctattattcatcaccaacaaataaccgtcatgaaaagaatcattctcatactcggacttgccgcctcgatagggctgatgggaaccggcagtgttcatgcccagttcgtcgtgcatgatcccggccacaccctgctgaactcaacggaatggatcgccaatgtcaagaaatgggttacacaaatcaatgaaatgatcgatgcccaggaactgcggctcggcctgcaaaagatcgaccagttgaaggaactcaaatcattgaaagagcttgccgacctgctggacgacgtagcctgcctgagcagcgactacagcttttacctgaacgtaggatcgaattaccactgcctgaaatttctcaactttcagcgtgtgaccgtcaatctgagcctgagtaccgacctgctgttcaaggtggccaccgtgaccagttacttctcgatgaactcggaagggcgcatgtcctttatcgagcaggtgaaggaatcggtggaaaaagccgccgaagagatgcgtgagtttaacgaatccgtgcgttccacggtcatttacaaatccatgaaggggcataaccggaagacctattaccagggacggttggccgctttcacacgacacaccaattaaagcgttatgaatcaagataattttctctggggacttcagatcacggacggtctgacgatggaactcgtttcgcaaatgacagtcatcgccttcggtgttggtgtcatctgctttatctgcaacctagcatacaactatctctatcacggagccagccagctgttaagcccgaatgaggacaaatttcccgacatgatggaaatcgcccgttgcctggtactgttcttctgcctaagcatatacacccccatcgcccaaaccatcgtaggcacgatggaagtaatcaacgaagccacctcgctgacctccgagcgtgcgcaggaatttgcccagttcatggcacaatcagccatcgaacaaggagagatgattgccgaatacgacaaacacagcctccagtcggaggtagcagccggagaagacagcaccggcgccatgcagcacgaactggataaaaagatggaagaggacgaaatgaccggtgtacgctccagcgtggagaagattgtgcagctgctcaaccccgccaacctcgccacccttgtgcttcatggcatttccgccctattggtaggaatcatacaagtagtcatcttgggtatcggcgtggtcattgtcaagctactggtcattctcggcccgtttgtctttgccgtaagcatgttgccggtctttcagaaacagttgagtatctggttcggtacgctctgctccgcctgtatggtattcaccgtcatcaatattctgaaccaaatcatatggcagaccttcaaggccatctatacggaaagtgccgacatggtggacgcagctacgcagcagatacaatatttaggaatggatctcgccctgattggtgcttattgcagctgtttctggctatcctccaaaatcgtaggacacagcgatgccgggaaaatcatttcgaaaaccgtgtcaatcgtcaccacggcggccaccatcgccctgatgggaggcgcagcggcaggcggcaagctgaccaacgtaggcggtgccgcctctatcggggcaagtttcataaacgacaacaataaaaaatagaactatgaatctgatgaaattcaaaggagcagatgatgcggtcaagctgactatccggctttcagccgggtactgcatcattctgactatcgcttttgccagcagtatcatcttccttatcaacaaaatagaaaaagcatacggccaggctctcgtcatcgacaggcagggagaagtctatgaggcaagcagcctgtctgccagcgatatgcggcaatacgaatacatgaaccatgtaaagaccttcgtaacccactggtatgcctttgacgagagcagctacgagaagaacatttcgcttgcgctcaacctcataggcaacaaggggaaggagctgttgaacgagtacaacgatgtgaatatgctgaactcactcatacaaaagaatatccgttacggggtacgcatcaaggatgtagagattaacacacaaacgatacccgtttccggaaagataatcttcacgcagaccgggtaccgggcacggggaagcatctcacgtaatatcgaagcggagttcaccatctatgatatgctgtcccgcagcgaggaaaatgcgcacggagccaagatagaagattggattgtccgctattccgaacccgtggaaagcaacggcaccaacacatcgcaggcagcttctccgggcaagaatgaaaaccagtcagaaacctctaaaccaaccgaccatggaaccgaataaacttatcaaagacaagaacaagctgttgatggccatcccggtaatcctgggcatcctcttcctttatgtattcttcatccgtgaggacgggaacgtgccgtcagggagtgacagacaggccgcctcgcaagcctttttggaaccacagtcggaaatggccgacaaggtgaacgacaagatggaagcctataagcaggacaaactggaagagcaggagaaggcacgcatcctgaaagagtctcaggtcaaaggatctgatttttacttcgagctgcaaaaccagcaggagcggtatgaccgtgccacactggagcgcatccgccgtatgcagaacgatccgtacagcgaagtcatggcagaatacggaggtggccggaacggacgcttctctcatcagctggaaagccaactggacggactggaggacgagcaggcgctcaacgagattatccgggaagccaagaagaactcacgcatccgcaaggaactggaagaatccgacaaataccgcaagcgcatgtatgaacggattgtcaattatgaccaagagggaaaaacggagaaagccgctgccaacccttccggccatccatccgccgacagcctgatgcaaaaaggcccgatctaccatgccgaaaacggcaagcgggtacgccgccaaccgacctccgcaccgggaaacagcaacctcttcagggcttgcatccacggcgaccagaccgtagtcacgggcagtacggtacggatgcggttgcttcaggacgtaaccctatccggcatgaagataccggccaacacgctgttttacggtatcgccactttgggagccaaccgcctcgatgtggtagtcagcaacctgaaggtaggagacaacctcaatcccgtatcggtggttgtcttcgacaatgatgccatggaaggtttgaacctgcccaataacctgaaagccagtgcagccaagcgtatggaacaaggtcttgtacagaacattgacatgccgctctcttccatcggcacgatggccagcgaagtgaccagcgtagtcaacgccaccacccaggtagccaagcaaatcttgaacatgagcctctcacaagtgaaggtacatctcaagtccaactacgaaatgtatatccaagaagagagtcaggaatcgaagttgcgtaggcaagccgtgcaagcggagttacagaagctctatgagcaaatggaacaagagaaaacgaacaagaaaaatcatccccttcaaacattgatagacaaattatgatagacattctcaattacctgcttgcgctgtcagcggtctttttcggctatcggatctacgtatcacgccggaacggacgagcctttaaagaaatccgtccgctgaccgtttctttcggcattaccctgcttcttctatggggcattaccgtattcaccgcctttttttcaagaaccgtttaacatatcgacaacatgaagaaatatatttatctactgttttactgctttgtgtgcagtctgccgctcttcgctcaggaaaacggcactccccggaaacaagccatcagccaaaaagacatctttatctctttcgactgtgtgaaacacctggtatttcctgtgcaagtatctgatatcgccatcggcgaacaggagcttgtcatggccagccgggtagaagaggcgccccatatcgtcaggctctcggcgcaagcggaaggattcaccgaagagaccaacctgaccgtagtctgcatcgacggaagcgtttacacctatcacatccgctaccttcccgaaggcggcacggattcgtacccgaacatttacgaggacaacgggaaatggcagcaccatgactatcaggcagaagtcagcgacctccatctggccgagttcttctttccggaggacatcgcttacggaacgcccggcaacgaggtgtccttcactctggccgcctacaacaaccagttgaaagtatcaaccgccaaagatgccgtggcatattccaacctgtttgtggtggataaggccatgaacacttaccacatcaccatcaaacggggcaatacctccgtattcacctacaattttgatgaccagcgcaaatataccgcccatgtggatgtgaacagcgaggaaatggaaagatgcatccaagagctgcgcaccaagaagcgcaacatctacagcctgggggtcatcgagaacaagtttgagttgtcaatggccaatctgtatgtgcatgaggacttcatgtttttcatctttgacctgaaaaacaaatcatacatcgactacgacatcgagtttgtcaaatgtttccagcgtgaccaaaagaagagcaagaacgccatccagcaagaaacgaccatcgaacctatctatcagaaagattttgatacgaaaatcaagggcaagagccggaaccggctgatacttggtttcgacaaattcacgatacccgatgataaggtattcgagatcgagatttacgagcgaaacggcgggcggcacatcaagctggccgtgttgaacgaatacatcctttccgcagaacccttatacaagccacagccatgaaactgagagaagcattagacacctatatgttcgacaacgtgggacagttcggcggcatcgccgaatcactgggctatcagaccgaataccgggacggatatttccggttccgcaaagacggggaagagctgagcatgagcgtaagcgaaatcagggaaaaagccggagcaaagtacgatgaaagccttcgtgaccaatcaaaagaacgtgtatccgccctttttgacaaggaacgtgccaatgatcctaaatatgtcgccgagctggagaaggatggcatcagcatcaagcggtgggagaacctgaagggacatgacaaggacggctttaccgtcatcgaccatcgcctgaaggtatgctacaccggacagtcgctctatgaatacgcctacaagcaagggaacatcctcgacgggaaaggcaccaagctggaaaagggtgtcatgtctgatttgatggagatacacggcaaaccggggaagctccgtttcaacgatgacggaatctccgtattctaccgcaaagaggcgttggttatcccggacaaggtgctgggaaagaagttgggcaagaaagagaaagaacagctgcttgccggtgacatcgtacccatcaccgtaaataagaaggacatcctgctgcaagttgaccgggatctgaactccgtcatcctgcgcaccaaccaggaaatcaagattcccgacatcatcgggcagaccagcgaatatggcggctacaagttaaccaaagccgacaaatacctgctcgccaacggccatgcactggagaacaagctgctgcacagtccggaaggctacttcattgccgacatccaactgacggatgacaggaaaggagtcatgatacagaacatacagagtatcactcccggcaaggcacaagagctgatcaaggccatgacccccaaactggaagcccatgcggccaacatagaagctgcaaaagagcaaaaacacgaagaggggcgcaatatggaagccgagtttaaggaagcggtgggcaaacatgactttgaaaaaatcgggaagctcaaagaggaaggatataaacccagtgaagagtttatcaaaggaatcggtaaggaacacggtctggatgaaaggcaaacccatgaagtcatccagctgttcggcaccaagccggaagaacagggcgaacatgaaaggcaggccgcacgtctgttggatgccgcacagaccgacaactttcatgtcatccaagagatacagaaagaagggtaccggctcactcaagaagaccttacccggatgcgtgaaacgggtgtgcaagccaacacactgatagccgtacaaaagattttcgggatggaaggcagcacaaagacactgggagatgtcaaactggccagcacacccaaacccgacaacagcaaggaaatggcccgtccgatagccagcaccatcaaccgggctttcaatgacttataacctaaaaaatcaggaattatggattacgatgaattagtacagaaaaacattgcaggagaaatcagtgacttagagtttctacttgcacaggaagagcttgcacaagcctatcaagaagagatggctgccaagcagcaagagacaaacaaccaaacggccagagaatggctgcttgattacgagaacagaaatctataccaataaatcatggatacagcaagtgataaagcattacagcgtttcgccgaactgatgatcgaaaagataaagcaggtggaagacaactggcaaaagccttggttcgggataaagggtgggggacttccgcaaaatatcgagggaagaacctacaacggagtaaattccttcatgttgtttctactttcggaaaaagagcagtacagcctgccggtctatatgaccttcatgcaagccaaagacaacggccttaacatactgaaaggagaaaagtcattcccagtcatttactggaatttctcagtaagagacaagaacggaaagaaaatacctttcgacgtatataagaacctggataaaaacgagcagcaggaatataaggtcacgccgtttctgaagacatacaatgtgttcaacgtacagcagaccaatcttcaggaaacgaaaccggagaaatgggaagcattgaaggagcaattcaagataccggccatcaaggacgagcaagggatgctcaccgtgcctctgattgatgcgatggtacgggaacagcaatggatctgccccatttattccaaggaaggaaatagtgcttaccatgcaaggggagaagataaccatatcgtcgtacccctgaaggggcagtttaaggacggagagaatttctactccacactactgcatgagatggcgcactcgactggagaacctgagcatctgaaccgggaaaaaggcgtgattttcggagacaagcaatatgccaaagaggaactggttgccgaactcacctccgctaccgtcgggcaaagcctgggaatatccacccatatccgggaagaaaatgccatgtatctaaaaaactggctgggagccttgaaagaagatcccaaattcatctacaacatccttgccgatgtaggaaaagccagcaatatgattcaggaacataccgcacggatggaacagtacctcacaccggaggaacggttcacgcaggccgtcctgcaagacaaccgtccggtattggagcagatgaaaaacgaaggttttaccccttcatcacggttattggaaagtgttgcggcaaaccatcctacagccgacaaccttgaaacgctacacagcactttcggcatttcgctgccttccatggaagcggagccagccatgaaaaatatgaatgagccacagctcggattataaacttttaaaaaccatcattatgtttacaggacaaattatcggttatgtcggtgcggatgcccggcagaacaagaacggaaaaggattcaacttccatgtatccaccaagtacaagaacgtgaacaacgaggaacagaccctatgggtatgctgtttcgtgaattacgagagtaaagtctttgagtatctgaaaaaagggacacaggtatatgtctgcggcgatgtgtatgccgatgtattccagaaggatgacggtagccacatcccatccgtcagcctgaccgtctcacgcattgagttactgggaaaggcagagaaaaaagagagcggtgacggaacggcatccggacaaccccaataacagcaacggccatggaaagagagaagaaagacctgtcattcatcctgatcctgctatccacgctcatcgggacagccgtactgtttcagtgggctatcgttacgggattatacgctccactacgtaatccggccatgtgggaaaggctgatggagaaggatatcctattccggtttctctacgttatcctgatcggaggcctcgcttttctctttccggttggcaaagtgaaagacgaaaacaagaaatgggtttacaccagtatgacactggttacggcatccatgctggttgtcggattcagccggttatcagcgtggtataacctatttgtatttcccattctattcgtagcgtacacgctgcttgtcatcaagactctgccttatttcatccggcgtcatgcccaatccgatgatagcattttcgggttaagccgggaagaatcggctttctacttccgctttgaaaccgcctccgggccgctggtcatccataagccgcagcagaatgtctatatcgacggcggtccgggaagcggtaaatcagagagctggatcaagggaatcatctaccagtgcgccgagcgcaactatgccggattcgtgtacgattgggagggtgatcccaccaaggacaagtcacccatcctctcacgtatcgcatacggaagcatcgaacatttccggaacaaggggatggaaacaccccgtttcgcctatatcaactttgtggatatgtcacgcacggtcagggtgaacgtactttctccgcaatacatgtcaaagggaaacgaatcgctattcatccgcaatatcatcatgacactgatgaagaatctggaagcaagctggaaggaaaagaccgacttttgggccaacaatgccatcaactacgtctattcaatcgcctataaatgtttcaaggaaaggaagcttggtatctgtacgctgccccatgtgatagcccttgccctttctgacagcaacctagtattccactggctgtcggaagatcctgaaatcgcattgaacatgtcctccatgctgaccgcctggaaactgggtgcacaacagcagacagccggagccgtatcatccgcacagactccgttggtactcctgaacaacaaatacatcttctgggtgttgtcgccacttcccgaagaagagttctctttggatataaccaacaaggaacacccaacgctgttatgcgtaggcaatgcgcccaccatcaaggaagccgtttcccctgctatttcctgcatcggcagcgtcttgatgtcacagatgaacaatcccggcaaagcgaccagcatattcatggtagatgaatttccgaccatcctgttgcaaggcattgacactttcatcggaaccgcccggaagcacaatgtcgctaccattctcgccgttcaggacttcaaccaagcggtcagggactatggagagaaaagtgccaacatcctgaaagcctcctgcggaacgcaggcttacggtatgaccggaaatgagaagaccgccaaagacatcgagaacttgcttggggagaagaaagaagcgcaagaatcttattcacaccaagccggtggcaataacagtgtcacggagagcctgcaaaaagaaaaagtcttaaaggcaagggacattgccggacaagcagccggacacttcattggcaagattgccggaggcaagccgccattcttcagcgtgcagatggatatgtgccgttttgaagagaaggagataccccgtttctccttaccggtcaaactgggcaacggcaaagaagagatggaactggaaatcctggaagagattatccagcagaactacatcaaaatcattgaagatgtcaacgccatcctcaaaaagatagaggacaaattaaaagaaaagtcagcagttccgccaaccgggacacacaagacagaacaaaaaatcatccgataacattcaacaaaagaatcctaccatgagaaaaattcattcattattagcggcagcctgcttattggccgcttcatgcaacaaagaggaaatccaatcggaaacagacaaagccggcatgtatcacatcaccgtagccgtaaccggttcctcacccaaaggcagtgtgcatatatataatcttgacggcgtgagattcaggaacgaacgcaccggtacctccgcagcttccgtagatgagagtttcaccgataaagcggaatacagcacggaaaagcctgtcagccaaattaccgtgcaaggcattctctattcaaaagagagtgctatcatcaccatgcagataaaaaaagacggggaaagcgtattcaaccagagcaaacagttggaggccgttcccggtatagacactactgttgatttggtttacagtaccttgaaataaaaatgcagacgaatcaaaaaacatatactttctcttccatatttagatgatatttcttatctttatgaaagataatctttctcatttataatctaagctcagataaaatgagattcaactaatccagtcaacgttatgaaagtcgatttcaatcagataaaaacaaccatttctctgcccgatttcctgctggaactaggatggaaaatcgtggaaggctcttccaactcctgtcccaaaatgagcaacggaacgcataccatcgtcatcaagcggaactcgcagaaccaatacacctattgggacgtgcatagtgacagcgtgcgtggccgcagtatcatggatctgatgcaggaacatctatttgaaacaaccggaaaaatgccgtccttgcgcgaggtgggggagatccttcagaactacatcaacaccaaccgcatcacgacacccgaaaaaagccggtatgaagtaggtaacacaagcatgagagcggacgaacttcaattctacttgagccagctacaaccctacaagggcaattatctccagaaaagaggtatcctgaaagaaagcattgaaagccggttcttcaaagacactttctttatccgtgaggtaaagaacaaagggagtgtttaccgcaacgtgtgcatcaagatgtacaatgaaaacggtgtgcaagccatttctcaacgaaatgaaacattcaaagggattatcggtggcaagttcgactgtctggcgaccagcaaccatgacaaaagccgcccgatagacattctctacattggggagtcatttatagactgtatctcccactatcaattacgccattccggaaacgacctcaatcttgtatatgtatctacggaagggacattcacggaaggacaaatgaggctattacgcctgattcttgacaagaaccaggtaaaggagctccggagcatctttgacaacgacaaacaagggcacaagtacactctatggctgcatcgttactttcatggcgatacgactgatgtcgagagcctgagtaacgatgaactccgcaacaaggtacggaaactgaagaacgtcgaactttcggaaaacaaggattggaacgatgatctgaaaatctcgtgtggcatctgttcctccacggaggacggccagtaacctcatagatttgctccatcacataatacgacaacctataaaatcagatcaatatgaatatcaagcatttatttttttgtatgctgctcattgccttttcctcatgcagcaaacccggctatgagaaggccattgcggaatgggttcagacagattctcacggcacctggacggatttaaagttcgaactactggaagtgttggaaacagaagacgtcaccgtatcggacagcctgtgctacctgaacaacaaaagcgcacaattatccgctgtcatacagaaagcggaaagtccccgtgccttattcaaaccgtccttttccgcctatatggaagccgaaaaaagcctgaaagcaacggatgccatgaaagccatgtacctgcaccgtgacagtacggaagttatcggcaagatattaaaatgcaggtatgccatcgtccagccacactcaggggtgcagcagaaaaagacggcttctttcctattgtcccccgacatggaaaaatgtatcggcaaactaaagccgacaagcaaataatccgagcgtaacgatgtgtagcgacaacgttttttggggttcttttttgggcgtcttccaaaaaagaactcccacacatttagatgtgtgggctattcattacactaccatcctttcccttatcaacggtatattatcccgtaccaaattcagaatccggtcatgataggctgataattggttagactttccacgacactggcacacctccatcctgctaagtgaaaactccaccgtttccatgcgccttccatccaccgttgccgacattatcaacgaatcttctctcttataataggcgttgctgaatacacaatgatgcagcaactttccctctttgtaaaagtccgaaaggctttccaatacccgaaccataatatttccatccgcaaacgaaagattaaagaaacgtgatttggcagcaatatagtctttttcatccttttcagaatattttttcttacatttccccatcacccaatcatgcgcttcttctacattcaacggacacaaataatgaggatttctcgcatccaatttattttctatcagcatatccacatagtccagccacaagtccgcatcatgtatcacatagtcatgtcttaaacagatttttacatacgtccaatacttatctataccgtattttctctctaaaaatctcaagaacaaattcatttgccctgccttatataatatctccatccgattatcagttaataatgtcataaagaaggaactcggacaaatatcataaaaggcacccttaaatccattcctcgtaagttcgggtatcactttcattctcggatagataactgccgggcaaatatcataaatacggtcatgatgcacattccgcttacgcaattccaaagaacttccatatatccatgcatcgtaataaaatatagacatgccccgcagcaaagacagcgtttctgtcttgccctctttattcatccaacactgtaccgcctcaattataaagtaattagccggagacccttttttcagccggcagtccaccataaaaaaacggataacttgatattgcttgtatgtagtaatcacacaaaaatattctttatatacagccgtccttttcctgctattctccaatttcaggttcataccgcaatgaggacatttacagtttttcttatcttccttatcccgccatgtatgcccacaatccaaacaaaagcaattcccctttgcatcacgcttgaaataatgcacaaagcaatgtttataggcataacgcttttgagcctctgaaacgggagctaacttcctgctcccattcacgatttccatttgtaattttgtcttgggtttcatatcaaaaaagagttaactgggtttgtacttcggtgttgttctcacgtttagcttgttgacgcttcttcaactttgccaattcttcctcctgcaattttttgatagcagcctcacgagccgctttcttttcttcctctgacaattcaacatgatgatttacgactacattacatttcaatgggctacccacctcaatattatcttcctgataatagtgcaacgccataccaaaaatttcatcatcactaaaaccacagcaaccgcttttcttcacttggtttaaaatataggtaatgcaattatctatattctttgtaggtttttgatagactggagcaaacagactatccaccgctgccatattatcaaggtatgccttgatggtacttttaaattgttctgacactttcatagtatatcatttttagatttcatttcacaataagccaatttcacgagaaacaaggagaataggcaaataagagccaacaacgtaaccgacacaacctttatcggacttggcgttattaccgctccgacaaacatagccactgcacaaagagcgatgatgaccgaaaaaacaaattgaatgatttgcatatacttctgctacttagtttgttaaacttctaattttatgcttcagctagatttaaagacctttttttaaaacccctttccgggatggccttttctttctgccgactttttttttgagctttcatgccccatctgagtttatgagccttttttttacggcacacaacaataaggaaggagggattaagaaaagttttggacgacaaaaaatgttggggacagcgaagccgtccggcgttatttttttcgggacaaaggggcgaagaccggaactctttcgtatccatccaccgaaataaatttgccgttcaaaaacaaaggatctcagatggagctatgaaaaaagcacattaggggaggcagaaaacaaggaaaagggcagtacggaaagtaaaacaaaccatacggttttgcttgcaaaaccgtattcctatctccctgccacaagtgacagggggggaacgggttagcaacggactgccgggacaaacggtaaaaggaaggaactgcaatacggaagaaggaggttgtttcggcaatgccgaagctccggatgatgaccattgcaatcccgcccacgtttggaacttctcttttctggtttgcccataatcagccgcatagcggatgactacgggcaaaccgggaatgagaacagtcattccgatgaaggggagggtggggaagaatactgcgtgaacgcaaaaacactctcggatatgtagcaaaaaaagcggcactaggccgcttcaatcatttgcttgcttttttctttttagagacagccttctgtttaggctgatccggtttttcttcttctttttccggagccggataaaacttggtggctaccatcacaatgcggttacgcttctccccacttttagaatccgtccattcttccggcttaaagtagccttcaacggttatcagctcaccttttttcaatacatcgaaggaatccagtgcttcattctttctccaggcttcaatccccatgaaagcggaaacataagaggtttcttcacctgtcttgtctgcacggctgaccgcgatagaaaagcgtgctacgcttgctgtttcaaaactacggatttctgcatccttaccgataaaacctgttactgcgaatgaattttcaatctttttcatatctctgattttttagaagttaattaatcaattttacagtgcaataactgattgttggctttgggggacaccatgaaaaaagatataaatactctttttatgctggccggaaaaaggaagatttgtaacttttttattggtgaagatggcagcaaataattcgggttaaatacgctttttatgcaaggcaaaaaaaggaagatttcagacgaataacaacgtggtgtttgtgaatcgtccccttatccccgtaaaaggggttagcaacaatctatatttgcaacggaaaatgatttgacttccctaaaaaatgatatgaaaaagacaaaacttgaaaatcagcaacaggtttggaaaggatgcaaaaaacaaccggtcagacagcaagcatggcacattccgaaaatatggtcagccgcctatcgacacaccggaagaaacctctgcaattccttttaaaaaaatgaagccgaagaatgaagcatacaatattccacgtatcgaaaaaagtgactgcacgataaaatgaaaggctgcaacggaagaacagacttgcggattctgcggggagaacataaccatacaggcatacagccactacaactgtttccggaaaaagaagattatacaaccggaaaaacagaaaggcatccactcggagaaaagcaagcaaacgattgaagcggactgccgatttagcggcgaaatatccgactacctatatacagccctaaaaggctggggcatatgggtaagcaacagactgccgggcaaataaaaggagagtggcatagccgccggaaagaggttgtctcgatgtggccgaagctccgaaagcagaccggatatgcctctctcctttgccttccccattcctggatttcacacaatcacggagcctgcgagtgactatgagaaatcctgaaacggggacagtcactccgctgaaagggtgggtgggaaacatgtgactttctccaaaataacaaataggggtataaagatctcaaaagaaaagaaagccgttccagaaaagactggagcaactatcaccatctactgttctttaagttaattgcagcaaatccaaatcatcagtgaccaatccatccaatacatgttggattttatcaaatatagccttatctatgccatacgtggcgcataacgattgaaatttgcttacagcatcgaacacctgtaatatcttcttttcgggctcctctacaaaatcctcggcaaagttgacgaaatcacttgtagtcaaggcagaccttttgcccatcacgcccatcgaatgaatgtgtgctgaagaattttcccatgtatttgccgtgaacattacatcatatgcaggtgataaacgccatacccctgccttatccatgataaacgatatgttcttattatgatcatcggatatacctgcgacataattaaataccattctgataaatatctgatctttgtcttcctggggaagtttcagagtctctgctatccaacacagcttcatataatcatctgcacccggcataatggccgcaagggtctgactaaagagcttttctccattcttacgatcaaatctttccgttacgaaatgatttcttccatcaatttctttcaggaagcatggcatcatgttgattcccgccgcctttgccatttcgctatataccatttctatctctgtggtaggagagtcatctgcttctttaaatttgatgatatactgcttaaaattttcaggcaaatccacctggccggaacgaaactcttccgtttcgagattataggcaatcactgccttcgggcgcatgccaccggcagaagttccaagatatatcaactttttcatcgtgaggctatcctccggtgatatgacagcagcatctcgatcattatatattttagaagccaaagttgccaatgatgacatatttactgactcatggatggcatcatcattaaattccggttcaaattccaatgctcccatagccctcttgccaatataagagagcttcaatagaggcaatgattccgtaacctttatattattatccgtgagccattggtcaaatagggaagccccccatttgtcaggaagcgcatctgcaagaaattccggaagcccttgatataatttatctttattcccatagaaagacgcaaacaaaggggttctcttagggtgtgtggaagggcatatatcataatcttgtttcctatattcatccgtaaattggaatacagaacaatgcttttcaaagtcccaattcaatttgccaatgcaagtcccccacagatatacattcactataatcggctctttcttcataccatcttacgtttaccgttaattctttgtattcttttacctgttttttcattgattaggaaaggggagtctggaagttccggaaccaaaccgacaacgccttcaagagttccacttatacgcaaaatcttaagcaatgtacttagggcaatatcacttactttacaagattctattctcttaatagtaacgatagatactcctgccttatccgcaaattcttgctgggaaaaacagcagctaagtcttatagacttaactctcttgcagatttcctttacaatacattcatctgaaaattcgtatattgtatatgtatcatataatcttttcatagaaaaacatatttaggtatcatttttgatacaaaaataccgataaatctgaaaatcaccaaattaagaaacactttttttataatcttctgccgcattagcaaacgattgaagcgaccttgtgccgcttcaatcgtttgattgctttttctttttagtccgggggttcttatttttccggagtcgggtagaacttagtagctaccatcacaatgcggttacgtttctccccacttttagaatccgtccattcttccggcttaaagtagccttcaacggtaatcagtacatctttttgcagtatccaaaaagcatagcggtcttccatcttactctaggcttcaactttcataacagaggaaacaaatgttttttcttcatttatcttgcctatgcgactgaccacaatagagaagtgtgcaacctttactatttcgaataaatggatttctgcatccctacaaatcctgcctgttactgcgaatgaattttcaatctttttcatatctctgattttttagaagttaattaatcaattttacagtgcaataactgattgttggctttgggggacaccatgaaaaaagatataaatactctttttatgctggccggaaaaaggaagatttgtaacttttttattggtgaagatggcaacgaataattcgggttaaatacgctttttgtgcaaggcaaaaaaaggaagatttcagacgaataacaacgtggtgtttgtgaatcgtccccttatccccgtaaaaggggttagcaacaatctatatttgcaacggaaaatgatttgacttccctaaaaaatgatatgaaaaagacaaaacttgaaaatcagtaacaggtttggaaaggatgcaaaaaacaaccggttagacagcaagcatggcacatcccgaaaagatggtcagccgcctatcgacacaccggaagaaacatctgcaattccttttaaaaaaatgaagccgaagaatgaagcatatcatattccacgtatcgaaaaaagtgactgcacgataaaatgaaaagctgcaacggaagaactgacttgcggattctgcgggagaacataaccacacaggcatacagccactacacctgtttccaataaaagaagattacaccaccggaaaagcagaaaggctccactcggagaaaagcaagcaaacgattgaagcggactgccgatttggcagcgaaatatccaactacctatctacagccctaaaaggctaggacatatgggtaagcaacagactgccgggcagtcactccgctgaaagggtgggtgggaaaaaactaagtggacgcaaaaaacaaccttaccattgggggataaacttccccctattttcacttcacatattctttaccccacttcaattgattcaacaaacttcaacaacaaagcgactgttaccgtatgaaatgaaagctgattgaacaacttatgcgctttcagcatctcaatagcggcttcagccgtaacaactctctgttcataaagccgaattgtcgcatataactggtcatttgcgacaggccccattattaggtcatagtcaccgttttctcttcctctgcggttgttgacaacaaactccagccattcttttgtcgcacccataaaccgaagaaccggatattccctatcaagaatatcatcgggaacttcataaacagagacgattgctttttcgctctgttccctgttcttcttcaacaaagcccatttttttgcttgttcaaagttggttgtcgtataaaatcccttcccaaagtccgtagccttccgtcctttctgtatattagggcgtttcacggtaactgtagatccatgaaatagtctcattttcttttattgatataagtcgttatagtatctaatatatattcggggtcttgggtatgaagcatttcaaaagtctcatccaaaaaatcaaaaaccccatagtccgaaaacaacaacaaggtttcttccgcactttgtttcttttcctccctataattctcaatgcagaacatcttgaaaagcaggatcttcgtgtcaccgttataccgtcgtttttcttctgttttttccttctccaatgtttcataaagcgacaatgtacttgaataccataacttggtactcttatccagcaaagatttatacaacttggaagaatatatataatacagtgcatcgcctaaaggcaatgcctttttcttcatgaccagttctaccagctctctcatcacgaatgggagcatggttgagtcaagttctccttgatttttatgagtaatttccatattcttgttgttattactttagcatattttcgaaaacaccttcttcacagttctttatacacacctgacactcggccaccacttctcttaatattcgggcacattcttcattcgaatgcccttgcagtaattcataggcatatcgcatcagttcattagcttccattgtttccatccttatcaataatattcaagttcatcattattttctgcaacgactccatatttggagttcctaaccaacacacacctatgcaaaaggtcatattgttctctgtatctgaaaaacgcatattgttttaccttttacaaacattgttgtcccattaaaatctaaaagagttctttgaaatatttgaaatttagttagttacagcgattttccgagcgaacggacttgaatttgtagctttgcatcagattaatccgatggcatatgttccaagacaaatacgttttcgctcaattggcttcatttctgaatcgaagtaagtttaaccgcatagtcaccaagtatgatggtgataaatatgtgaagcacttcacctgctggaatcaactacttgctttgatgtttggtcaactttctaatcgtgaaagtctgcgagatttgatagttgctcttgaagctcatcattccaaatgttatcatttaggaatgggtaaaaatgtatcaaagtcatcgctggcaagagcaaatcaagatagagactatcacatctttgaagaatatgcttactacctggttagcgaagcacgacaaaagtgtgctaatcatattttcaaacttggcggtaacgtttatgctttcgattcgactactattgacctgtgcctttcagtcttttggtgggcaaaattccgcaaaaagaaaggtggtatcaaagtgcatacattatatgatgtggaaacacagattcctgcattctttcatatcacggaagcatccgtacacgattctaaagttatgattgaaattccttatgaaccaagctcttattacatctttgaccgcggttataacaacttcaaaatactgtataaaattcatcaaattgaagcctactttgttgtcagagcaaaaaagaatctcgggtacaaatccatccaatggaaacgtaggctgcctaagaatgtgctttcagacgcaagtgtatttctgacaggattctatcctaaacaatattatccagagccacttagattggttaaatattgggatgaagaacaagaacgagaatttacattcataaccaatgcgatgcatatatctgcgcttcaagttgctgaactttataaaaatcgctggcaggtagagctgtttttcaaatggctcaagcagcaccttaaaatcaaaagattttggggaactacagagaatgctgttcgaatacagatatatgctgctatatgcgcttactgtttggtggcaatcattcaacacgatatgcaactgaacagaagtacatatgaagtgttacaaatactgagcatctcattgactgataagactcatctgagagacctctttgataaaactaaatttcaaaatgacaaagaacgattcggaccaaatgggccaagtttatttaatttttaattcgtcccaattttaatgggacactaatgttttacaaaggtaaaacaattaagtaaaattcatctatcattgcttttcatatttattgtgtctttctcttttgcatcggaagtattagcacttacagcaaccagacagtatgacatcgccacgtttgatcataccgctggaaaacaacgatatacaatctgaatcaaaacagattgtatatcaccaatttctttttttgtgccttgttaaacgtataagaagttcctccggcagattttccatcccaataggcaatcagcctacaggcgtgtgaaatcatgtaatcattacggtgggcatagcattgggcataataatattcggatagaactaccaccttgtcggcttggcgcaaaatatcagcatacctctgtttgtcctctttgttgaaatacacatcttgcccgacataaggaacaaccgccaccaaaaccatatcgggatattgtttcctttgttcaagtacggtatgagcagccatcatgtcaaatccaaccgcacaaccaatatagaaaaaacggattccattctcatagcagaaacgtacctcttcattcaacgatacggacaaagcatatttatttgttcgtatcgttctatgaccggtaaaagcaacggacatcattttcatccatttatcacgtgcctttctacatatatccaacgaacctgccgaagtttcatacaccattccattcacctcataacgataagtgaaccaagtagtatctccaaagatatccttctgcttctctatataactctctttttctttcatcttataacatacggacaactgttttacctaaaaagaaacctcccaaaacctcacctcctattttttccaactgacatgcgaaacgagcatacgaaaacccttttgttaaaatatcgtcaaataccaagattttcttaccccgaaaaaagtccttgtcaaattctatcacttgtactttttgaagcgacttgctgtcaaatttctcgtgaatagccaaacgatctccactgacacgtatatgttcatacgcattgatagcacctgaaaacttacacacagccgaagcaaaccccttataacgaagttcattcttatcagcggaagaagccggaacacaagcaaaaacaatattcttaacatcatcaccaaaaacttgatgtaacttattcgctatcatccaagctatattcaaataagcttttccatccttaaaactccatatcatcttacgaatttgccattctctttccgttgcctgccgatattgcataggaagatactcaaagaaagaaaacatcatcttatgccattgtctgtctaaactaggatatttactctgatgtgccatagtcttttatctattaaaattaaacttatgcttcagctagatttaaagacctttttttaaacccctttccgggatggccttttctttctgccgactttttttttgagctttcatgccccatctgagtttatgagccttttttttacggcacgcatcaataaggaaggagggattaagaaaagttttggacgacaaaaaatgttggggacagcgaagccgtccggcgttatttttttcgggacaaagggcgaagaccggaactctttcgtatccatccaccgaaataaatttgccgttcaaaaacaaaggatctcagatggagctatgaaaaaagcacattaggggaggcagaaaacaaggaaaagggcagtacggaaagtaaaacaagccatacggttttgcaagcaaaaccatactcctatctccctgccacaagtgacaggggggaacgggttagcaacggactgccgggacaaacggtaaaaggaagggactgcaatacggaagaaggaggttgtttcggcaatgccgaagctccggatgatgaccattgcaatcccgcccacgtttggaacttctcttttccggtttacccataatcagccgcatagcggatgattacgggtaaaccgggaatgagaacagtcattccgatgaaggggagggtgggaaagaatactgcgtgaacgcaaattaatgggattaccagtaactccaagcgttttttgctacttttttggggtgcttgccaaaaagtagcggacagcaaaataccctcccttccctaatccaaaagaagggagaatgtgcttcattgaaggtatataggttccgttccctgattataacaatacatagtgttatttctgaaaccatcaaagcatatatgaaaatcatcgaaatcctgttccgtggccaaacgaaccttatcactcaacaaaaccatgcattgtttattgacagatgtagccaaagaggtagtacgtcccggctttatctccaatgccaccacataagaagtccttcgtggatagatatacccaataatttcctcattgagtacaaccaaacgaataacatcttcattcaaaacgggaatattattaattttgcccatcattgttataatataaatcagtttataatcattaaaatacaatatcattacaaatgatacctataatttttataggtaaacttttccaccgagaccacctcataaagatagtcttcatggcaagaagccattatacagttctcacattcaagaataggatttataactacacggaatttaatagtgccgtccaccagaacaaactccacccgattaaagaacccttgtagagaatgcccttccttatccatcagacgcactacttcacctgtaaaaacagccaattccttagcctgccatttcgctttacgcaaacaactgttcgccgctttgacgttctcattcacctcttttgttcttattgctttcataccaaaatcctttttacatatttatcttgtcaaaaatcaaaagtcagctgcgtagcccttgcgttgctctgaatcgacctcttcaattcagaattatcctccattgcattttcaagtttcctaataaaagaagtgtcacctgcttccgttatctttaaaataggcaaccatactccggctatcagctgtaaatctatatgataacttctccaatgctgcattgtcaatgtattcatccatgcgacttcaccgggtacgctattcatcatcagattgacaacggtcatctttacacaaatcaaatctatatccgagccataacaaaaaagccttcctccatcattctcttccgcacatttttttacagcggaaagtagcatcctgccggaaccacagcacgaatcacagaccgactgtttaggtttcagcctatttccccccatacatgccatcaaatcagcaacgtgtatcggggtaaagaactgtccgttattcccatgactgacacactccatgaacatatctcccaagacatcgcaaaatccttccgaatattcagacaccctataaaacatttgaacaaaaagttccatttcatatggcttatatcttttttccactctacgataatcctccgccaacatcccgacagacaaatagtaaagacaaacatccaaaaaatcccgaaaggcttcttcatatccccgactgaaagcaagcttttcataaagtttcattatctcctttggtatcatacttttctgacttcattattcacaacattctatattccttgtgccatagattttatcaaaagccgcttttatctccgagcgatatttacagtccttctcaaaacaaagttgttttgtccaaaaatcgaaatcaaaaccatcggtattatcaatcgttacagaaacataatcagtcataccactctgacatacaaccgtatgccgatttacacaaaagtggtcatttaaagcagtttcttttcgggtaatgcgttctaccatcttatctatccacttcatacttataatattttatgtaattgccccattccaagaggcagttacggttatactcattaaaaatcgttctcgttcaaaaacagcacatcgcctttcatcaccatccaattaatctcactcagatgatagccacaatgcccactcaaaaaaatctcaatctcttcagtggtctgcaatctcctgtctgggcttatcaccgcaacattaccggaattacaatccaatacagccagtttctcataagcccactcaccaaactggcagaactcgataaaattggtataggttatccgtatgctattgtttgcatcaaattcaaggggtgactttgtaatgaatgaacctgcatgattcaccaccacagaggggctaatctctgccaatgaagataagctgtcatcccatctaatctcataaaggaaaaatccttttggcaatgaattgcggtctatacgataactggaaaaaagaccgtctatcgtttcattaataactaactgttcataatctccttctaaatagtgtactcgtgacataactcgttgttttttgggattgttaaacttctaattttatgcttcagctagatttaaagacctttttttaaaacccctttccgggatggccttttctttctgccgactttttttttgagctttcatgccccatctgagtttatgagccttttttttacggcacacaacaataaggaaggagggattaagaaaagttttggacgacaaaaaatgttggggacagcgaagccgtccggcgttatttttttcgggacaaagggcgaagaccggaactctttcgtatccatccaccgaaataaatttgccgttcaaaaacaaagggtctcagatggggctatgaaaaacgcacattaagggaggcagaaaactaggaaaagggcagtacggaaagtaaaacaagccatacggttttgcctgcaaaaccgtattcctatctccctgccacaagtggcaggggggaacgggttagcaacggactgccgggacaaacggtaaaaggacggggctgcaatacggaagaaggaggttgtttcggcaatgccgaagctccggatgatgaccattgcaatcccgcccacgtttggaacttctcttttctggtttgcccataatcagccgcatagcggatgactacgggtaaaccggaaatgagaacagtcattccgatgaaggggagggtgggaaagaatactgcgtgaacgcaaaaacacagtatgtcatcttaaaacaatatctttaaaaagtttttcagaagaaatgcttaccaatatcctaataattattacttttgataacataatacaacgatatggaaaagaaaaagattacaatagaggtagaaccagctacagccgtagctaccgtcggtttattgcgtgggatatttcccagtatcatcgaacaactggaaaggcaagccgcaacaaacggcagccccttaaaattcaataaagtagaaaatatgcaagaagtattggatgagatttatgaaaagtgcattgccgaaacgaacctccgggagtttgcccaggcgcacttaaatagtgacggattacctaactgatacagaaatacggaatctgccagccatccttattccaaataacaaatggtacagaattacacacctgtcatgtgggatgacaaagcatttgcctttgtcccctacgaagcattcagtgatttgccacattatcccaaagaaaaatgtgagcaaatttgcaaagagctgaacagccttataagactatgtacttataggccgaaaaaggaagatatttattttcatccggtaagttatgtacgtcgttccggaggtttcatagttacggataatcaggcatcctttgagaaatgcccctatcctgcttgcgcagaccgtcatagctgccaaaaaatatgtgatttgatgaaccgtatcattgaagagtcttaattatataaaataccatggaacatccaaactccaaatgcagaatagcacaagctgaatatttaagtcggctacctgaagaagaacgggaaaataaggccagagatattagaatcggaaacgccagctatatttaccaccaacaagcggttccaatccaagaaaacagattgataatgtattataaagagtggttggaaggtcttcctcccaacatttcacgccatatgagaatgcttggatttgaagcatgtaagacaatgattccgtttacgagatatgtgaacgaaagaaacgatattggtatgcgtgactggatgcaagagcatctttcaccgagtgacttcaactattggcaggaactttcgaaaaaagcaggttcgccaacattttaatcccatcccgttcaatacgctgcctgaagaataaaaggtgcgtattaaacgagaatattttttagcgtttagtcatctcttcccgcaccagttccgtttctgtcggggagagtttcggcaatttgacagttgccggactttctaactggtaagccttcacctcattgataagcagctgccagtcaaaaagaaattcttcggaacaaccatgtttacgataaatttcttttgctgcttccaaaatctcaggagcgcaaaaatcgtctccctgaaagacaactgccggacgatcattattgatacagtctctcaataatcgtaactgatctttcattgtgtttacctattatgcgttctgttgttttaccattttcaaaaattcgtcagacggtttaaatgccggtatgttatgagccggaataatcatagtagtattcttagagatattccgagctgtcttttgcgctctcttcttcactatgaaactaccgaatccacgaagatagacattttcctccttacccaacgaagtctttacctcgttcatgaatccttccaaaacagcaagcaccgctttgccgtcgatgccggttctggcagatatttcctttacgatttccgatttagtcatttctttataatttgaaaattagcgtgcaaagataattaatccaatggattatttaaagtctggcatccgcagcaagccctgccttcgcccaatgaagtgttaaattgttgcgtatgggtcaagttccttaatccgcttacacaaataatcaaagcgtttcttggtaagcggtgtgagtgtatcgaggttcttgccatcgaaattctctccgaaaataaggtcgtccactcctatgccgtgattgtaattctcgcgcacgcaatcacgcagaatccaaaggttatgcaggttcacccagtcggctgtaatgtttctgattttactgaacagcagcgcagcagtgtaaaggtagtgtccgcaatggttgtagtcatgcaacaccagcttgccctggtaatagatgtcgaaatccttgttttcttcatcttcctttgtatcgcagtagaagaatggaatgtctttcagaccgtcccaattaatataagtagttggcttcataatatcttttttgaatacgctacataacctgttatttgcacactttccattattcacagaacatttgatgaaacacttccttcagtctttttatctcactgaaattcaaatctccaatctttcttttcagccggcttttgtccaccgtgcgaatctgatccgtggctatctccccatcacgcccggctacagaacacagaacccggtaaggatagttccttatggtggaggttatcggagcaatgactactattgtaaggtacatattcaaatctgaaggagttacaacaacacatggccgtgtctttgccatttcacccccacgggtagggtctaactctacccaatacactccatactgttctaccatgtccaatcctcaaacttttcatcctcaaacacatcagggataagcaactcatcatccccattctcatgggcacgtttggcagcttccgcccatccctgccgtggttgtgcctttatcacaatattgttcccgtccaaagaaatgctcacagccgatttcaaggacaaacgcaactgtttcaatatctcggaaggaagtattatccccttgctgtttccaatctgaataatgtttgttaccataatgttataactttaaaattgattatcacaacacaaatatagacaaagttataacaataccaaaagaaaagccaacttttttccattttcaccgataacccggccaacggctgcactcgtcgggaggctagtgccccccttgccgtgcggcgctccccgacctatgattcttatcatgtcttgtgtccttttctccgcttctaacaaacaaatctgcataaaatatagatttgcgtttccatttgaattttagttatttgataccctaactatgaatagcaaacagataactgatttttaaaacagcagaatgtttctgttttattaaaataaaaagggaacaaatttttaaggtaatacttacggaaaaaacagactttataacgtttctttttcgtacatttgcaacaatataataaaagcgaaacatataatggagaagcaaggagaaatcatactataccaaccggatgaagctgtaaggttggaagtacgtttagaagatgaaaccgtttggctcacacaagcgcagatagcagaactttttcaacgtgacagaaccgttattaccaaacatataaataatgtttttaaggaaaaggaattggaagagaaaagcaatgtgcattttttgcacattgctaattccgataagcctgtcaagttctttagtctagacgtaataatttcagttggatacagagttaaaagcgtaagaggtacgcaattcaggcaatgggcaaataaaattttaaaagaatatttattgaaaggttattctataaaccaacggctcaatgacatggaatatagaatgaacaatagattcttccaaatagagaaaaccattgctgaacatgatgcaaagatagacttctttgtacgcacctcattgcctccggtggaaggtatattctttgacggtcagatattcgatgcgtataagtttgctacagatttaataaagtctgccaaatgctcacttgtgcttatcgacaactatgtagatgaatccgtgttactcatgttgagcaaacgaaacagtggagtatcagctactatttatacacaaaataaacgcacagctccaacttgatttaaacaaacacaatgaccaatatcctcccattgaagctagaacctacaaaagtagtcatgaccgcttcttaatcattgataatacggaagtatatcatattggggcatcgctaaaggatttgggcaagaaaatgtttgctttctccaaactggaacttcctgcccatacgataattgatgtattatgaaataagctaatcacccatgcgagaagcggaagagaatataaaattcaagatggaaattgacgtattggttcccattccacgtactgtcacccgtgatttcaccagtttgaagcacctgcgtcaatggcagaaacggaatgacatcgatggttctctttactgttttgcacaccgggaatacctgctcaacgaaaagggagaatgggaacaatttaccgttatcggcaaacaggtagtgactatcggagaactggaaaggcttcttttggcaatgaagcaaaaggggttcaaccaatacagccgtgaggaatatgaagaattaatgtcttcatatttgaaaaagtgaagaattaaaaccttcattacacatttaaatacgaaaacaggatgaaaataggatatgcccgtgtttccaccaaggaacaacatctggatatgcaactggaagcgttgaaggctgccggatgcgagaaaatcttctctgagaaaatgaccggacgtcaacaaaaccgcccggaactggatgcctgcctgagctttctccgggaaggcgacacacttgtcgtatataagctggaccggcttggccgttcgctgaagaatatccttacgctattggaagatttcaagaataggggcatccaattcacctcactgcaagacaacatcagtacggaaggcgcaatcggccaactgatgaacaacattctcggtgctttcgctcagtttgaaagagaccttatctatgagagaacccaagaaggcagaagaatcgccaaggaaaaaggtgtcaaattcggcagaaagacacttatcaacaaaaacaacatcgccaagcagaaaagctgcatccaactctatgaatccggaacgccggtaagggagatacagaaaatattaaacataggcagtagcggaacagtatatcgcctattaagaaggaatggaattgcgctgaaatccgagaacaaaaataacaaataacgaataaacctctgcccatccttcaaagatgattctcaaagatcgtctgcaattccacctctcagcaagattataggaaagtccccttcacggggactgattttttttaattttaatacaataactccatgcactcctgtaccgctttttccaatgcttcttccaaacaacaaaaagcgtccgcattactttcggagtcatacaacacataatctccagccctcacaaccacatgccagaccgccacgttttgttctgtttgaaacgtatattcacgagtctgtatcatccattggatacatgctgccagtgtcgggcactcgcacatatacatcggggtattccttccctcaatatcggtgcgtagcctatcctgtttgtcataccaatactcacaaggcacgtaatagtataattccttcatcataagagctgtgtcgctattaaccaatctctctttgttgatttgtgtaatcaaattttccatattagcattatttaagttgaacatctgatttattcttcagctagattcaagaccttttcattttttgtatcgggaaggtctttggtcagccgaccttttttttgatgtcattccccatctgagttctgagccttttttcggcatatcaaggtctggattgcaagcaataagccaagtttcacttatggaaaatgtcgggaagacacttcttcatcgttattttccatacagtaaaggcgcatggccgtaacttgccatttgcggaatcccgaaacctttgccgagcaaaaagccggactcggatcggaggaaagaagccgggggaggcagcccacagaaagggcaatccgatacaatcaagaaattaacctgctatacccttgtgcgagtgaaataatccatcatagacactacatacctaagtagtggtatcaatacaccgatcacatatatcatagcgtagcccaaaaggacaaaaggtaatgttttacgataaagacatgcaacagcgagcaatataaacgaaaaagaaaagccataaaccccatattgaaaaccgggtatcaactcataaacaggtacgggttccggatgaagcatggctccggccacaatagaataaaggctggtcaataatataagcagcgtatataagcaactcttaagaatcctgggatcattccttttacaatagagaatcgttcggatatcacttctaagaaactcaatgcccagtaagagagccaccataacgcctgtatcaaaagtagaaaatacattcattccgatcacctttggcgcgaagatatgtatttattctgaaaagccacgtctttgcgtattttacgatgtcgcatccgatagtccgggaagcatttttttggttcttttttggggtgactgccaaaaaagaaccccgaagccgaaatcccgggcagacgggatttctcccgtccaccttacctattttgcaatcttccctcgtccgcatagctataatagttattgcctgccacaatcacatggtcaaccaaacggatgtctaatgtttcagcggcttttttaactgcttccgtcaagcggtcatccgcactgctgggcttgcgtgctcctgatgggtggttatgtaccatgataaaagatacggcgttataatacaatgcctgcttcatgataacccgtatatccacaggggcggtatttatcccgccgcatgagatacggactttacggatgagtttggacgaactgttcagcaacagcacccacatctcttcagtagctatatcgcacaaaacaggatgcatcattttataaacattattgctggataaaagcgcaggactttcaacttgcccttctttcagccgtttatatagctcaatcgccgcataagcgacttttttacggctgggtgttagtgtttccagtacatcagacaagcacaatccttctatttccatctgttcatacttatattcttcacgtttcagtttctcactgttcgtcaaggtataaatcaactcgctgttttccatcacccgataaacgtcattcacttcaaatacggttctcttcgttttcatactgccaaaaattaaaagattaatactcgcaaacatcgcttgtcgccccaaccataaatttttcctcaactgattgggaacagtgcattgaagagaaagcgggaaagacggatcagaacgggattgaactggtaaatactacctcccggaatgggaggatggagatttggcttttcaatatcgggcgttccggccacgcctaccttcgcaatgttcctatcagttcaggaaaaaatcatcatacctctcttccggcatagccggagcgtagagcgttagggatagcagggaaaagcctggagggtaacgaggacttgcaacgaatagcccggtcagaagggaacgccctgaaaaactaattcggatacagaagatgaacagaaccgccttccaatcatataaaaaagcgtgaaaatcaacacatacttccgaaaaatctttttccgaaagtacgtatagggcatgtgaagggaaaatttattttcccagtcatttctatgttatcgctttggggatatttaaaggggttaggagtttaggtctttattatgtattttggtggatggttttacacagccgataccttttatttaaaaatttctctcttttatttcactgatataccgacatataaaaaaaacagggattacctattcccttcattaacgggtggacggttttacacagctgacaagtgaaaccggacgcttttacacaactaaagcaaaaggagtggacggttctacacaactagaagcaacaaacgggacacttctacacaactaaaacaggcaaagcggatgactccacacatctaatcaccccaatagggacacttctacacaactaattctataaaaaaccgtgaaacgtggacggttctacacagctggatcgtccatgttcaccgccccgtccgtctccggagatatgaactcttcaggagcaggagcaacttccgttccattggcactctccaactcttcctgtgcccatccttccggaaacctgccgaatacagccacgaaatcactgatatatatctgtttcttcttttctacgctttccggggagtttgcccataaaaggaactctttatacagtccggcatcttcctccacctctttgatcttcttcctcctgacagccatatccgtgtccgggtaggcaatctcgacatacagcccaagcaggttcttatagaatttcttcaccacgacagcatattgtccttcatcaaaatagtgcagcgtatgcctaggaaacgagaacaacacggtatatgcccatctctcatgatcgcctttcacaaaagagaaattgaaattggtatatttcaggtaagtattcatctttttcagtatcgaggcgaccttctttttccggtctttgggttcggcaatctctatgccgagctttttagccagctgatcgactgtcagcacataaaaaggagcctcattcttggtggtcttatacttgatcaggtaaaccatcttggaaagttccagatagaaatagcggtaacggctgggcaggctacggtaatcctgaagttccaagaggttatagagcgagaacatgaaattctttatctccgggcttaccactgccgagtacagccttttcgttgacttcttcgtcttgaaatcggtcattatgtcgaaacgtttcaagatctgcacgaaattataggatgtacggccatcctcgccaatggtcggatagcagaggttctccaatcccagtttatagagagccgcctcaaaaaccgtctcgataggatggctgattctctgtcctgccgtgtcggtacatacatattccggctgcatattctttccgaacatggccgcgagctgccggctatccagcttgcgctgcaagttggtacggtcataccccatcttacggcagaagtcttctacggagaaccaggaagtcccgaacaagtctttgaggtgatagctgcccaggtatatgatcagatcgagcatgacatttccacctgcctcatacaaccgttcaatcagcacggaattatagctttccccaagcaccctagggacacgaatcagttcttttgccatgataatacttacaaaatcaatcctttctctgttttcattgccacaaagataggcataccggccaacatacgcgtcataattatcaatcagttttaacggtatgaccggtatgggaaaaggagaagtactttcctgaagaatgctttatccgcccttcatcagaaagaaagcatcttacacctgtaccccatagacatcctatattactttttcagttcttccgataaaaaggaacggtctatcaatacttgcaccaatggtttctctttgacaaactcatcaagctcacgctttatcaatttattgcccaaccctatgcgtcgtccaaattcctcgaaatccttccgccctacctgatgagcaatttgactccacattgtcatctgtaatcgactcaaccctcggtctaaggtgtagatcgttaggttatcagtacagcgaaatcatccgttctctcatgagtatctacttctgtggtggctcatgtattgaggatgtcactactcatttgatgaaccatctctcgcttcatccgacacttcatacttgtagttctgatactatcctcagagcgataaaggaactgacgcaagaaaacatctcatacacatcagatacgggtaagaactacgatttcaacacggctgacactctcaatactttactgctcaattgtatgtttgcatctgaccaactgaaagagggtgagaagtatgatgcaaagcctacatacaagaagttctctggttatcgccctggcgtggcggttattggtgacttgattgttggcattgagaatagcgatggtaacacaaaagttccatttcatggcacgttttctcgccatggcagagcttaagtaaacttagctctgctcatctggcttaacgaaaaccttcgttttcatcagaaggacacgctgaagaggttctttgagagatttgagcagaacaggctcactatcaatcgtttcagagctgattgcggatcatgttccgaggaaatcgtggaggaaatagagaaacactgcaagtccttctatatccgcactaaccgctgcagttcgctctacaatgacatatttgctctcagaggctggaagactgaggaaatcaatggcattgagtttgaattgaactctatccttgttgagaagtggaagggtaaagcataccgacttgtgattcaaagacagaaacggatggatggtgtgcaggatctttgggaaggagaatacacataccgttgtatcctgactaacgactatgaatcttccgtaagagaaattgtcgagttctataaccttcgtggaggaaaggaacgtatctttgatgatatgaacaatggtttcgggtgggacagattgcccaaatccttcatggccgagaacactgtgttccttcttcttacagcacttatccgtaacttctacaaggccattatccaaagacttgacgtaaagaggttcggactcaatgcaacaagtcgcataaaagcgtttgtcttcaggtttatctctgtaccagccaagtggatcaggacatcaaggcggtatgtgctgaatatctatacctgtaacaatgcttacgcagatatttttcagactgattttggataacgcctacaacttatgggtatgatactgcgtattgtctcaagtcgcattgtggggtaaggggatgttgtaggcagaagtgggtgtttctgcctcaatttatctgataattcagtaatgagaggacgtgtacacgcaagaaggacgttgaagggcttagttgcggatttgaggcaggtaagaaaatacaaagaattaacagcaaccgagaaactgaaataccgtatcgcagtgaaaatgacggcagccgactacttccgcctgctgacacgatcgcatgaggcgggcgtatcaccaagcgagtacatgagggaatgtttccgtaacggtcatgtgaaagaacggctgtcggaggaacatgccggatacatccgccaactctgcggcatggctaacaatctcaaccagcttgcgcgtaaggcaaacgccggaggcttccacgatgaacggtgggactgcaaggtggcagtggcaaggattcatgaacttataaccaagatagggatatgatggcgaaaatcgtaaaaggaagcgacttcaagggtgcggtggattacatcatcgacaagaagaaggatacgcagatagtagcaagcgaaggcttgtttatggaaaatctggaaactatcgccatgagtttcaatgcccagtcacggatgaacgataaggtgacaaaacctgtcggacatatcgcgttgagtttttccaaagaggatgagttacggctgacgaaccgtatcatggcaggcatcgcgcttgaatatatggaacggatgggaatcaagaatacgcagttcttcatcgcccagcatttcgacaaggagcatccgcacgtgcatattgctttcaaccgcatagacaacaacggcaataccatatcggacaggcacgagcgtctgcgcagtacccgcatctgcaaggaattgaccttgaaatacggcttgcatatggctggcggaaaggacaatgtcaaacgcaaccgcctgaaagagccagacaggacgaaatatgcgctttacgacatcatcaaaatggaagtcggcagatgcggcaactggaacgtgcttatcgccaacctgaaacggcagggagtggaagtacatttcaagcataaggggcagaccagcgaggtgcagggtgttgtattctccatgaatggctaccatttcaacggctccaaagtggacaggcgtttcagttattccaagattgacgcggctttgcagcacaacagatgcagggaacgtatgggaataacagccggaatatatgaaacggctacaccaagcgcaccgtccggcacggcacaaagcgagttgttcaacggctcttggggattgctaaaaagcagtggctcatcttataacactgctgatgcggaagccaatcaggaaatggtggatatacttcgcagaaggaagaaagttaagcgcaagagaggtgttgggttctaatattctgtactaatccaattctcacgacacttgcgctctatattcattcggagtgtaacctacctctttcttgaacagtcgggtaaaatgttgcgggtactgaaaaccgagattataggcgatttcattaacggtgtcgtctgtagatgcaagttccgtcttggctatttcaatagacttgtcatgaatgaaatgcagggcggttgaacctgtttcttttttcaataaatcactgaaatagttgggcgagaggcagagcttgtctgcacaatactgtacagtgggcaagcctatccgtttagcagccccatcatggaagtattcgtcaagcaaccgctcaaatcttgcgaggatgtctcggttttggttgtcgcgtgtgatgaactgacggtcatagaaacgtgtgcagtaatcaaggaacgtcttgatgctgtctgtgatgaggttcttgctgtgacggtgtatcggatggttcaattcatattgaatcttgtggaagcaatccatgatgatttgccgttcttccacactaaggtgcaatgcctcgtttgtctcgtaggaaaagaacgaatattcacgcattatccgcccgagaggtgtattccgcagcaggtcgggatggaacataagcaggtagccatctggttggaactgcatgccgtcatcttccgcaccgaacacctgtccgggcgcgataaatatcagtgtgcataattattcctaagtctgtgaaaccggaacgcatgaagcagaatctcgacatattagacttcaccctgtcggccgacgacatggcacggataaagacgctggataccgacaagcctttcttactcggctcgcacgaagatccagaaatcgtaaaatggttcatgcagtacaaaaacgcctgaacatcaacaaccatatttcgatagccgctatcgactatattaagaagttattcgtatatgcctttattgtaatccgtcatgtactgagtaaatgttttgcctgtttgctgtttgaagaagcgcatgagatggctcggatcagagaaattgaaatcatccgccatttcactgacagtgcggttggagaatagcaattcgttcttcagttcctcaagcagacgttgttttatcaaatgggtagctgatactccgaattgggcttttactgagttattgagtgtgatgcgactgacatgaagcatgtctgcatattcctgcacccgctggtgggtgcggatattctgttccaacaagtccttgaaccgaaaagcgaaattgtttttagcaatttcagcgggcaagcaataggcggcagcgtatgtacgattgataatcagcaaaagataatatagtaaggaaacaatgatattgtacgtatcggacactggattcatcagctcatacttaatctttccgagcagccgcatatattccttcatttcgtcatgtgtggcattgatgtaaggcggcgtatctgtctggtaacaatacaaaaggcgaaaaacgaagaacttgtcggcgataaaagtacgcatgaaatcttcgcggaatataaggaacgtgtaatccaacgccgtctcatctacatgccactcttgttgctgatggggtgaaagcaggagaaccatgccgtcgcgcagttcaatcttgcggaagttcagtagcaaatatccgtttgccttacggaaaaagtagaagctgaagaagtctgtcttaaaccgcttgttttctgtcagcacaagtccgatgtccttgtttatggcagtattgatgtaaaaatccacgccgcagcgtgtcttgttgaacggtacgctgaccagtcgatcagggttgattatctcgtccatatccttgtcgtttttgcaaagataataatttcatttatcaaaatggcataattaccgttttttcaggcatagatgtttcgccggattcttccgaactttgcacccgtaatcaataacaagacatatagtcatgaaaaagacatctacagtacaattggtgcgcaatgccaccttgaaaatcaggtatgcgggacacaccatgctaattgaccccgttttagccgacaaaggcactttgatatcggccctcggtgtgaataaaacaccgagggtacacctcaccattcctattcaggatattatcggaggcgtggacatggtgctcctgacccacaatcacatcgaccattacgagccgagtgtccccacacatttgcccaaagaaattcctttctacgttcagccccaggacgcggacgccatcagaaacgacggatttacaaatgtgatacccatcgaagaaataaaaacaatagacggcatatccatttaccgcacgaccggacatcatggtttcgggcagatcgggcagatgatgggacctgtatcaggttatgtgctaaaagccgagggcttcccgaccgtttatataatgggtgactgccgatgggaagcatgtatccgagacaccgtggaacggttcaatcctgactatatcgtggtaaactccggaggtgcaatctttcccgaattttccaaaacggacggtcctatcatccccgacgagaacgaagtgatgcagatacttgacgaattgccttcgcatatcaagctgatagccgtacacatggatgccatcgaccattgccagaccacccgtgcaattctgcgcaatgaggcaacgcatcacgaagccgacatgagccggctgattatcccggaggacggagaaacagttgtgttatgagtgtctgcattaaatccctgataaaaaacatgaacatagtggtagggtgcactataggatgcccttactgctatgcccgtaacaactgccgccgtttccacattaccgacgacttttccgtgcctgaatacatggaacgaaaactgcgcatcatcgatacgtcccgtcctcatgtgtggctcatgacaggaatgagcgatttctccgattggaagcctgaatggaacgcagaaattttcgagcggatcagcagcaatccccagcacgcctatatctttctgacgaagcgccctgacaaaatcagtttctcctctgacgacgagaacgtatggatgggcgtgaccgttacgcgcagttccgagaaaaggaggattgatgatttgaaaaagaatatcaaagcacgacactaccatgtcacgtttgaacctctcttcgatgatatcggcgagattgatttcgagggaattgactggattgtcataggcacagagaccggaaaccgaaaaggaaagtcatattcgcgccccgaatgggtgcttagcattgcagaacaggcaaaggctcatggcataccggtgttcatgaaagaggatttgctgccgattatgggcgacgaaagaatgattcaggaattgccggaacaatttaccagacgaatacaatgaatatggatacaataaaggaaatagatgtaaagagtgtaatgaccaaatcctctctgccggtgggaggatattcggtcaacccttatgtagggtgtccccacgcctgcaggtattgctacgcatcgttcatgaaacggttcaccgggcacaccgagccgtggggtacgtttttagatgtaaaaaactggaagccgataacgaatcctcataaatacgacggtgaacgtgttgtaatagggtctgtgacggacggttacaatccgtatgaagaagaattccaccgtacccgaaggctgctcgaagagctgcgaggaagcgatgccgagattatgatatgcacaaagtccgatcttgtccttcgcgatctcgacctgttgaagagttttcccaaagtgactgtgtcatggtctgtcaatacgctcgacgagcagttctgcgcagatatggacaacgccgtaagcattgaacgccgtctgaaagcgatgcgtcagacatacgaggcaggtatccgcaccgtatgcttcgtctcgcccatattccccagaataacagacgtaaaggcaataatagaggaggtaaaagattatgctgatttaatctggcttgaaaacctgaatttacgcgggcagttcaaaggcgggataatgacgtatatccgtgagaagtatcctgacctcataccgctttacgaggaaatttacaataaaaaaaggcttgaatactggcaggcattggagcaggacatttcaaattacgccaaggagcagggcttcccgtatcgtataaacgatctgccatacggacgctcggaaaaaggcaaacctgtcatcgtaaactacttctaccacgaaaaaatacgattgacaaaatgaggctatgccggactgatgcagaaaagttgtagcgcggataaaagcaccatgtatgtggataatatccggcaatcttccgagcgtatgcgggagatgctcaacacgctgctggatttcttccgtctggacaacggcaaggagcaacccaacctttccccttgcaggatttccgcaatcacgcatattcttgaaacggagttcatgcccattgccatgaacaaggggctgactttgatagtggagagccacaccgatgcggtggttttgaccgacaaggaacgtatcctgcaaatcggcaacaacttgttgtcaaacgccatcaagttcacggataacggtagtgtatcattggcagcggattatgataacggtttgctgaaacttatcgttgaagataccggtacgggcatgaccgaagatgagcaacaacgagtattcggtgcatttgaacgtctttcaaatgccgccgcaaaagacggcttcggattaggcttcctgcaaccagccgttatccaacagccgggttaaatgcgtcctccctatctcggccgtcccttgcaggacgacacagcggtctttctcctggagctttcttaattcctccagtgaagccgccattttctccgccattgttgccataaccgtttttatttagattctgattattttcgtgcaaatactcgtttttagacacgtgtaaatactcgtttttaattatgtgcatttactcgtatttgttgcaaaaatacaatatttgttccgataatcagctactaatgaagtctttttttacttgttgtatcgtcgaaacggcctttcccgtgagcttcgccacgttccggatcgagtagcctttctttaacaaggcgatcgcctcccggtattcctctttcctctgttcggccgttttccggcttcccggcttccgtcccagcctgccccctttctggatgtacaactcccgtccgctattaaggcggtcgatgatcccctggcgttcgatcgcggccagttcccccaacagggtagtgatcagagaggacaaggggtttaccgtcttgtccggccgtaacgtttccaggttcaggttttgaatatacacgcatattttatgcgtgtgcagcgtatcgagtgactttaggatctccagggttgaacgccccaggcgtgagatctcggtcagcaacaacatatccacccggttctgcggatctgtgcagtattccaggcaacggcttaaaaccgggcgttcgatattggcctttcgtccgcttatcttttcctcaaagaccgccgtcacctcgtacccccgtccggctgcgaacctctccagatcgacaacctgccgttcggtcgattgcctggccgactgcgagcttacacgtgaataaataaccacattcatcccttttgcttttgttcttccttatctattgttttaatcaccttatccacctctttcaaggaggcattatttccggatctatccaaaaaagaaattcgctaattaacctataattactatctttgcattgtaatgcttggtaaagcctctgttatcaaaacacgtaaccaagtcaaggatatacccgttcatcaagaacgggtttttcttttgcgacagcccattcataagacaaaggatattataacaggtcagtaatcacagccgccggaatatccagctttgagaaagcgaacatctttttccccagatcctttaacgaggctccgatatggtacacgtccgtttcatcaacgatcaggaaacggtcgtgactgtcccggtacgtcctgatgtcgataggtgggtactggctgttatgcctgtcaagatcaagttggagttgctgcgtgatacgctgggtgtaaatggtggccgagacaccgacgctgcgtttactcaacatgagcaagaccgtttcgtccacatagttgtcgataagcacgatcgaacgcctggccgactttaccagatcggtagcgaacttgtacgcatcgaaaatctggccgttataaaaaatgccttcgaccgggggcaaggcagtacgcacaaaaaaatctatcttctcggtatgttgagcgacagtcctttcaagttctgacaaacgtttattaatggaatacccttttaaaagatagtcctttaaaaccttattcgcccattgcctaaataaaatacctcttttactattgacacgaaacccaatggatatgatcgcatccaaattgtaataagtcagattgcgcatcacttgccgtttgccttcctgtcgaactgttcggaaatcccgaacagttgaactttcctctaattctttctgatcatatatgttttttatatgctcgcttatatttgctttgctggattgaaaaagatccacaatttgcgcctgtgtcagccaaacggtttcatcttccagcctcacttccaacctgaccgcttcatccggctggtataatatgatttctccctgttccattacttattcctcaaatccgcaactacgcgcctaatatgatacagaagcgaaaagaatctgcatcgttagtaaaaagggggcacagtgcatcgaatgtcaccataaagacatataaatgccccttaccccaccatgcgacttgaggcaatacgcaaaatcacgactataagttgtcggtgttatccaaagtcattctggaacacattggcataagcattgttgcatgaatagatattcagcacatacttccttgatgtcctgacccatttggctggcacagagatgaacttaaagacaaacgtcttgatgcggcttgttgctttgagtccgaacctcttcacgtcaagcctcgccatgatgaatttatagaagttgcgtatgagtgccataagcagaagaaacaccgtgttttctcccataaaggattttggaagcctgttccagccgaatccgttattcatatcatcgaagatgcgttccttccctccacggaggttatagaattcgacaatctctttctcggaagactcgtagtcatttgtaaggatgcagcggtaggtgtattctccttcccacaggtcgagttcgccgtctatccgcttctgtctttgaatcacaagacggtatgccttccctttccatttctcgatgagaatggaggccagctcaaactcaatgccgcccaattccactttcttccaacctctgagggcaaagatgtcattgtagagcgaactgcatcggttagcacggatatagaaggtcttgcagtgtttagcaatctcttccactatctcttcagaacacgagccgcaatcagctctgaaacggttgataataagcttgttttgttcaaacctttcaaagaacctcttcagcgtgtccttctggtggaaacggacatttgtgttgccgtcgctgttctcaatgccgacaatcaagttgccaataaccgccacgccagggcgataaccaaggaacttcttgtatgtaggcttcgcatcaaacttctcagcctctatgaactggtggtcgaagtcaacgtcatacccctcgccctctttcagctgccctgtggacaataggcaattgaggagcagtgtattcagcttgtctgccgtgttgaagtcgtaggtcttgccagtgtcggatgtgtaggaaatgttatcctgggtcagttcctttatggctctaagaatcgtgtcggcactgcatgtgcgaagtgtcggatgaagcgaaaggtggtacatcagatgagtggtgacatcctcgatgcatgagccgccacaaaaataaacgctcataagcgaacggatgatttcgctgtattgataaccatacagcctgcatctcataccgagggttgagtcgattacagatgagagtctggagtcaaattgctccattattgaaaatattcctccaaaaggagtgagtttctcggatttaattgctacctttgccatgtctgtcgggtttgatacatattttgatttgcaacactaagataggtgaaaaatctgacatggcaaattcctgagcaactttttgttgctcaggtacttaaaaagttatatttgtaatagtgttgcggaattaaggt

SEQ ID NO: 588 - DNA, 39565 bp, Bacteroides ovatus
  source 1..39565: mol_type = genomic DNA
ttcaattcataacttattgacattttttttctttcaatctttaaaagtgctgacttgacttttggtggtggcaaaaaactctcatgagatatttcatacataagttttaaatcaaaaaaagtatgataaaacacaatatatggattgaaaactttttttgaaaataacttttggacaggttcaagttgcattatcaatgaaccacccataaaatgctcaacactatcaaacatcaaggattttaaaatttcagaagttattctgaaagggatattagacacaactttaaaatttctttttggtatggtgtaacatctaaaatcacaatcaataattttgacattcgtgttgttagaaaacttgttttttagaatggacaatagcgatttatcattctctattgcaattagatttgtgcattgacgaactaaatgaacagtcaaaaatccttttccggcaccaatatctataacagtgtcggattcatttattttcgcaattttaattgcatcatctatcagcactttatctatagtaaaatgctgtcccgtgtatcttacgggcagtttattttttatcattacttatttcttgctgaattcaagttccaaatgcaacggaattcatattaataatttgtttaaatttttcgtttggtgtgaggtatccaagtcttttacgaggtctattatttagattgttttcaatccatttaatacgcttgttggttacttcactaaagtccgtaccctttgggatatactgcctgataagaccgttagtattttcattggcaccacgctcccaagagtggtatggcttacaaaaatagaaattaatatctaatttttgtgctatatcctcgtgttttgcaaattcttttccattatcagccgttattgtgtgtattaagttttttacttttcgtaatgcccatactgtaatctttgctacagggatggcttctttccctgatagcttacgtatccatactctgcttgttgctctatcattaatggttagaatagcacctttgtgattctttccaataattgtatctatctctaaatcaccaaatctttctttttgctctacaattgaaggtcgctgatcaatctccactctattcggaataaatcctctacctgcgtttttagaaccacgctttgaatatttgcgtccttgccttctaagagatttatgaagatccccaccttgtcgtttatcttgccatatccaacaatatatagtttcgtgagataccatagctatattttctacttggcttctgcccactatctgctctgggctcaagtcctttcgtagaagcttttttacacgcttcttcatagcttgtgtaaatacctcctttcgcttcttttcaaccttacgtttatctgcctttctttgggcaagatcagggttgtattttccactacgactatcgcaattgcgttttatttctctataaatattactcctatcaactccaatagcttcagctatatcttttttactcatcggaacttgcaacatcttagaaattgcatacctttgcttttcggttatatgtttactcatctacaacttttatttctttggacggacaataaaaacaaagatagtaacatttatccattcagcagagaacagagggaattgtctctcttttctctctgaaaaaaatattacttatgcagctattaatccttttctttaaaagttgcatttataacttgaactcaagatttaaggttaatatcctgtaggttgcagggagaacaaacgggaacagccgttcccgcccctttcggattgtatgccagcacccctaaaaaatgccttgtcaaagacaagtagtaacacgcctgtgttacgttttcgacttttcagccgtccgaccgccaccccgtccgatttgacttgcctttgaggttatatatgcaaatgcaagaagccccccccggcgaaaaccccgccggaggcttttacaattcaaagggaggtgtttagaaatagacgttcaacataaggtatagtaatgcgttcttatccttagtgtcgtggtgttcaagctcgaattgaatcttgtcctcacgagcgagccagcctatcgcactggcagcttccagatcattgaaccctgtcaattcctttacttcctgcaaattccatttccggtgtacgtctgtgcttaataagcgccagagtttccctgcgttctctctgatgatgtgcttatccatacctgtattttttataagtttataaatggtttcaaatggataatgaaaagcacttttacatcaatagtgttacgcactgcaaacattccagcgtttatcgtttatccttttgatacgttgtatcactctttcctgatatacagcaaaccgtttcgccgttcgatgtatatcttattctcacgtgcgagccacccggcggcgagtgcggtttcatcagccgcaaaatttagccttctcgcaagctcggcaatggttataagtccggtttcgcctaatttttctaagatgatcccggctttaaatcctatatttgttttttccatgataaaatttatatttatgtatcaaaaatatgtatatattctattattcaaaacgtgtagaaatacaaatttaaattcaccccccctattagagaaaattaacaatttgtatatcaagcttttttcatcctcaaaatggaatgactattttagagggtattaatttagtaatatatagttgaagaacaacgctctgaaacattccttgtcactattaaacaggcacaaatatctcccctttacatcctcaaagaggatataatacaggcaggaattaaccccgaatctatttgttctgatgatttttgaatggcttaatttttggcgtacttgtttttccgtcagcccttcgatgtatatcaaccctttcatgtttcccatttgtccgggcgtgatcttgagcgagcttagtagttcgtttaggtcaaacagcttaggagtgtttgacaaagagtttagggactgttttcgctgtgtcttttccattgccataatgtttttgcttgtgccctacaccaagccaataaacataaaaaaagcggaagggcattcgcctatccgcaagcgagggagtccaagccctatacacacaaacaggagataccccccgcatatcacggggagcatttatctgtttctctgtgtataatgcaatttttggacttttcgcttgcacagaaatcagctaaacgctttttttcttcaatatgtaaaaacacggtcggtttacgactgcacaaaaataacaatttccctataaaaatgtttcctatttagaataattttttcttgtttatcagataaacaacaagctacatttctatatactcaatattttccaaaccatataacgggatgatattccgaaagaacacatctattgctagaggatggttttgaaaagcaagaaaagatttccccgctacggattccagccggtaaatggtcacttcatcttcttccccaaactgtttccttaacttatcattgatcgttttctgcatcttagacataagtttaaccaccgtaacaggattccaacgatccatttctacagtcacctgcttactgtcggaaaaaatagaaatgcttttctcaattcctttagaagctatatagtaagaaaagaacaaaagagcttccatgccgtttttgcctacgtacagattgatcctagcgtttctctcctgcgctttcttgcagacatgcgcacaaaggataggattagaagaaggcagaagataagaagtattctgctgctctgtctgtccttctaatatactaaagatagcaggattccagcacacgtttacgacatcagaagttacatcttcatatatcgctgcacagcaaatatcattgtcaaacacgagctgatactctttactttccgggttgaactggtaaaagttccgaatcttatgcgcactcttcagttcaaaaaggaaatagccctcgttatttgaaacctttctcaccttccggatctccgtttttccttcagtaatatcaaagagataagctatcagatcttctttgctacatacgtgatcaaaactaaactccttcaattcctcgctttccgattgcacctgtactttcgcttggatggatatagataattgataagcgctaagatctttgaaatcgaacaactccaaacaggatatcttgtttcgttccggtgaataaattatatactcccggtcattaatataataccggtacatgaaatcgccggtttctaacggctggtatggatttaaaacttcgctgtagttcatgattaacttgttttaaattaaatgcaattggttcgatatgtgtattcatcaatcatatcattaccgataatatcaggtagctcaaaaaatcttgtagctgggcaaacatgggcttcaatctctatgcaaagaccgtcacccggcatataggcacaacctacgctatcgttccagtttatatgcttttgggctgctttagctactttatcgcaagctgataagtattcagcatatttactgtttgctctttttatttttttgaatagtatatcgttcatttccgattcgttatacgttaatcttcatcttcaggcattaattgtcctgcttcataataatactgagaacatatatctgatacttcattagataaatagtcctgtatttccgaaattttatccaacagcttatcacgagtatctatctcttccggatcaatactgaacccagaatactcctcaaacgattttatcaattcgcttacgtttttgaagcgatttgcttccatactaatttgcttcttttttttgcgcattttctattcaattttgttattaatatgataatcctttatttcgctttttctttttcttgttgtccggaagatcttcatcacctttccggtgcttccctgatccgttatctaaagccattgacatggcaaccgggtacatatagataagatccttctcccattcgtgcggattactcgcataacacacgataaccggatcgatgggtgttgctctctcctgttcttttccctgttccggattctgctctttttggaagaagtcttgtatgttctgataggttaatctccttgatacatcagagcttttaaagatttccggagtatcgacatttgtaagggcaaaggatatgccgtatatccctttaccgttgacgtgctcgatcagatttatattatgctccgctagccggtctttaaaatcttcatagctggatgaaccattaagaactgcaaagatcttgttatacagataatgcttttgctcgtctgcggtcatttgttttccggcgaacaaaagtttcccaaaccggtacgattccggaagggctgtatctttcagataaaagcccctatcaggaatgccatatacataatgagatttccccttgtccgataccagacgcatataatacccttctttttccaatcgatcccggaactctttcatgttgccgcattcctgacgcaaacgatccatgacggaaagtaactcgtccttgagtaatggattaaagaactttccttttgataacatatctaacatattttcgtatgtatcttcccccaatatgattttccattccgcattagtataagccttagtcatatcaggattaatcgttttaaaggtttccgactgccctagaagatccttcacccgttcttttgcattatggctgcgcaaagccttgtgcaaagctgtgtcaaagaaatattgccggtactgggattctcccaacgtcttgttccgggaagactttcctttctccataacttcaagcccatgtttaagctctagctctcgcatgatctttccagaacgtcccttgctgtaactatcagagatccacaagccgtttaagtctatcgtagtggcaagtatatgtacatgtcggtggtccttatcatcgttctttatgatggtgtagcaagaatcaccgtatcccattctttccaaatattctttcgctacttcagaaaacttttcgtccggaagatcctcccctatcgggctgctaagaataaattctatatatggtgatttcacacgatcattcagaccagcaacaagggacatattacgatacatattaataagagaatcaccagaagaattatataattccctagctacactgctttcaatcttctttaactgataatcgattttgcggtttaatgcttctcctacaaacgggtcttgtatctccgctatcatattagtttatctgttatttgcttcaactctttaatgtacatctctatactttccaatgaaagacgaatattttcatcaacaggtaaagagttaacatgctttgcaagttgattcaaattagtacctatttttttcagttcaaagacggtttgaatatccgcttttgaagttatcctttcccctaaaacagattttcttaaatacatagaaagtgttacaccttcagctttagctcgtctgaaaacctgttccttttcttcttcagaaagacgtgcccgaataactttagttctattctctttcattctatattcctattctctattctaatgtatgtgagtgaaacgaacatcactcgtcagctcggctgtcgcaaggtgggttttgtagctacaaaaccacaccttgcatatacaaagatagataaaaattataaagcaccaaaactttaagatctatactttcggaaaaatcaacccaaagaactgattccctaattaaccaagtaaccagataacttaacaaaaggaagaactgaaagcacggcaacaaaaaaacaactagttaactagtttatcagaaaactaattaatccataaactaattaactaattaataaataaatcaaataacttattaactagataactaatctattaattgtataattaaccacttaattaactaattagtttattaaatggttatgtaataagattattagttaattatttgttaaacaagctgattaatttgttagttagattattaattcatatattgcgaaaaatttaaactcgtaacgttatgggaaaaatattaccgggtatattcgtagcattcgagaacccaaaaggtggaacaggtaaatcaacattaacagccttgttcgcaggatatgtacatgagagccacgagcagacaggtttaaccattggcgttgtcgatatagacgatgcgcaaaatacaatgggggagttaagagctttcgatgaagcacaacaggaagaggatataaaagacgagtatgaagtaatgagtatatcttcatcagacttcattaacagcatagaatttctcaaagaaagtttcgatataatagtggttgactttccgggaaacttgaaacaggcaggagtagtagaaaccctaatgatgatggatgtggtcattataccttttgctccttcaaaaatcgaagtattgcacactgtaaagttctacaattactacaaggaaaatatcttatctaaacgagaaagtctaggttacaaaacaatagtaaaaggattgcctaacaaggtaacacctaatttgcttgaatataaagagcttatagcaaacaaagacaatttacctttcgagctactgaacaatcatatcaaggaaagcaaagttaattaccaaagaaacctttctacgataataaacaactataatcacacctgtgatgatttcggagaagaaatgatacaattattaatcaattacgttaaaaaatgaaattatggctgaagaaaagaaaaatacaggaaaacccaaaacatcaatgttcgcattggtacaggctggtaaagaagaagctaagaaagttcaaagtataaaatctgtttcatcacaacagacttcagaagagaaaattccggaagtacaaccagcagccagcaccacagaaccagctaaagttgttgctccagtacaagaagaagaaatcattcaggaaaatgagaatatgacagaagaaccttcagaatttcccgaatcatcttttcctaaaggtctttctttgcttttcgctaaaagagagataatagacacggaaacgataaagatacctagagagttccatcaagaacttaaaatactatctacaatgtcaaaagttccaatgatgcaaatgctaggaaatctgcttgaagcatttttggaagaaaataagaaagaaatagcaagctataaacgcaaattcataaacggtactttaggaaaaaaatagccataaggaaaggttgttttacctttccttatcatattaattagtaaatcattgacaatagaagacatgtaaataatcaactaaaaatatatatatgggaataataaaagtgcaatgctcttgcggtatgctatggctaagtgaaacacttggcggttatgataccatttgcgaccatgacggaaagatttgcggtgcggtcaactaccaagatgaacagttccaaatcattcagccggaagaatgcaagaagcacaaaagggacacaatgaaagaactcaaaggggctttgcaacaagttaaaatggaaatagggtaggggatttcctaccttactttccattaagagataaccggttactggttttgttttggttcaaccccaacagaacgcaaatatttatacaaagttctcgtggagatattgagaattgaagcgatctcttttgctgaatagaagggatcttttgacagatacattttctttgcctgctcggctttctttttcgctaaatcatttaagccgggctttcttcctcctgttcttccctcacgttttgcgacttcccaacctgcaaccgttctttctgtacgtaaaacctgatcgatttctgccaacattgaaaatatcgggatcaaaagtttcccggaaggagtggacgtatcgatattatgcgttacatcgacaagatgcgctcccttattcattattagatctacattcgtccggatttccttcatggatctgcctaaacgatccaacgaccagacatataagatatccccagttctaagatcttctaatgcccggattaattcaggacgttctttaaacgctgattttttttcttgataaattttctcacaaccagccttttctaatgcttccaattgcaaagctggattctgatccggagtcgatacacgtgcatatcctatcttcattataatacgaggattttaattcttcattaaacatttattgaggatttcattttatactaatttacattatttagccaatctagagcctcctgcaacgtataggcatattccgcatgataaatatatgaaacttcatcaccttgcctatattcacggtcattgtctgtttctcctagaatgtactccatgtttggagttcctaatcgatgcacacctatacaataggtcagattttccactcgctggctttttttagttgctaaaagaaatatcctttctgtatcaattgccatattattactcctttcttattatttgaaattatcgcaaatggcttatatttaaccaccatccatcagtttctagtacattttccctactattattatcctgtataactatatgatcatcatataatccatatgtatcactacagtctgcacaagtgaagcctatggaaacattgtacttcataaacaactgaagtaaatctttcttcaaatctttaatatcatcatcagtcatatctattatgcttttatcattttactttttgtaaaggtagtaaaataatttagtaaaacaataaagtaaaatgtgttttttcttgatacatgccaaaaaaaacattttacttaacgtataccaaaagtaaaatagctgttgtttctctttctcacctctgattaaatgagattggagaattattactttcctcaaaatatgacaatttgtcatgcccgatagtatttttccgaaagtatgatgatataaactgaaggaaaaatatcatttttccggtcatttcttctgtccccctttgggggattataggggggttaggtttttaggttatattaagaaatatggtgtagccttttacacagctgggaaaaatcacttttcattaattagctaaaaatcaacactttaattttttgcgatatctttaatatggtgtagtattttacacagctaaattgaaaagtgtagtgttttacacagctaaattttcaaaagtgtagcattctacacagctggaaacctaaaagtgtagtgttttacacagctggaaacccaaaagtgtagcattctacacagctggaaacctaaaagtgtagtgttttacacagctggaaatgttaatagaattgaaaagtgtagtgttttacacagctagataatcttttccggttcaggtgtcacagtaggtggatttttaactataaattcctttggctcacgtgtcacagtcggggcattactagttaatccaaactcttcaggggtttttccaaatacccgaaagaaattttccctatatacttcctctttcagtgctttgttttgtggagaattagcccatgccaaataatcttcatacaagtttcgatcagattttatatcttcaactttgttaacccgatctctgcctaccgcacaattaggaaaagctaaaccagcgtatctccataacagatcactatagaatctttgagtaaacatagcggtatagcgttcatcaaaataatcaagcgtttcttgagaaaattcaaaatctaccgtatatgcccatttatcattagcacctttaacgtacttaaattgaaagttggtaaatctcaagtgttcatttatccccttcaaaacttttgttacatttcttttcctttccttattctcttcaaaattgaggttgaacaacttagccaactgatcaacggttaatctgtaactaggtgcatctcctgttttgattttatacttaataagatatatcattttcgatagttccaaatagaaatatcgatatttggaaggtaactctctataatcctgactttcaattagattatagagagtataaacagaatcctttatcagattattcagagtagcactatataatcttttcgttcctttcttggttttaaaatttgtccggatttcaaatttggtaaggatctgaataaatatatatgaagtgccttcgcttgtagaaacaggataagacatattttctaagccaagtttataaagggcggcttcaaaaacggtttctatggggtggcttatttcctccccgtttatatccttacagatataatgaggtgagcgttttccaaaaagatccttcagctgttccttagatagttttctttgaagatttgtccgattataacccattttattacaaaaatcctctattgagaaccatgattcaccaaatagatctctaatatgattcccacaaaggtaaattataatatctagcattacactaccgccagaatcatataagcgctcaattagcccagaattgtaactttcacttaataggcgtggaacccggcttaattctttttccataataaattatcatttatcctttttccgtaactctgactgtacttttttatcgtatgcttcccctcttgatactagatattcaaatttaactgtatcatctacaatcttaacgtggaaaataaagaatgctctataatctcctatacgaatccgatatactgatttataggcaatgagtttcttgcaattagtaatttcatcaataccattagcattcttcacttcccggatcatatcaaggacagaagacagaactttccctgataatttatctactgcctttaaaaatggctttgaatattctacattcatgataaaccatatttctgttcaaaggctttttgttcggcttcactaaccatgacatgcccttcaggttgattcttggaaagaaacgtataagttgttatatcttctaaatcattagcagcggagatcaataagccttccataaaggctttagctgatttcccttccttagctgcttgtacggatagcacagttataacgtcttccggcagatccaacagtttctttctcttatcaatttgggtgtttgagattgttgttcccataatcatttatgttttaaattaataatctatatctttgcatgaattaatcgcccaacaaagatatataacatatataacatatacaatatatataacatatataagttatataacattcgatttttttgatacattgaactatatatacattttttaatattaaagaaatggataaactgactttggaagattctttccgcgagcttattaaacaaagaaagtggtatgtaaattccctacgttcacctattcaggcgaaatatgataaagcgacctttcaaaaagggggcaaagttcctgaagaacgaatccgggactatttagctgccgctggttggaaatgtgttcagcctgaattatgggagaaaacataaaaattacaatatttaaccacaaaatttttgctgttttaaatatttatttgaattttgcattcaatataacgaacctttttttaaactgaagttttctttcctttttcaagatctatttgctacttcaaaaattccgctttctttccttgcaattttgactctatcacgcaaagtatctataataggaatattccgatcaatcccatacatatataaaataggatcggaagcatcacctgatataactttcactgtcttgttgccaaatactaattgcaagaaattttgtttttctgaataatcaatcactctatataattctaaatgttcctctcgtcttgagattataccatgcctgaaaatcagttcatccttagtaataatccactttgtagcaaacagcgtgtctatatatgtgtaacacaacataatccaaacgactaaaaacagcaccattaacgcatagtgtacaggcatttctaaatcccaataaatagcagagaacgggagtaaagatgcgacaacaattatcacaaaatactttgaaacccaataacctagtttgggcttcaatgttatagccgtttggttatccataatctagttctttatattagtatattgtatagactttgtattattctctgaatccggaacggaaactgtattttgatagatctcttttccatcctgatacactgtcattttcaatatagcaccggatttacttttgctaagaataatcccttgagcagaaataaccttcacttctttagaggttatataaactttccgtccgctaaaatactccgttacagaactttgttttaggtctgtgttacttgtttcatctataattgatacgttatccggattaataataatagcttcagctgtataatcatcccctgaagcctctaatactaccttatatacagcagatgtattattaaaaacaggatcattatccgatccaccacaagaaactaatactagagtagcacataacgcaaacaaatgcagcttaatttttttcatcatctttatatattttaaattcagatccatgtgtatgtaaagtaaacaaacccttatatttttctttctagaaattttctctgctatcaaaatcatagctattgccgttgccatcaataagcccaaattgatctgtttctacaataaacaaatcgctcgtttctgataacttgctaaaatctttaaaaaactgaaccttcatatttttcttatttagtcgtagctttcatccttccccagcacgttttcatatcgggagcgagtaaaaactcgccaactctctcctgcctagcctttaaactaggtggaacaattgcatacttgcatttcaatagtttggctaacacctccgtactatctctatccttatactccattttctttttctctatccattttaaattatctttagccttggtgtaatcagagaaaagcggttttaccaaagcacgaggattctccgctctttctatcatctgtacctgttgagcagctttactatccaaatacaataagctgtcggaaactgtaacatctttttcgtcaagcaactctatcaattcaaacttaagatcagtccaagtaccgttttcatcggtttgaagccaatccgctattgccttttcatattcagttgatccacacgaagataaggcaaataataaaactatcaatatcctacttttcatatattattttttttatattttcacaaaaatacctcttttattccttccatgccttatgattatgatctttcggcatgtttttttccttatttttattgtccgtttctgtcttattctttacatcttccaagatcgcatttacttttgaaatgattgaaagataatgttgactaactatttcttccattatatcatactctaattcttctttgccatctcccaaatttacaggtttggaaaaagccggaatatccttatctataaacttacacatattaaattgtgtattaaaataaggtggttttccgccagcgacctttccgatgaagtgaccaacactttgtccggcaacttcacgagcctttactactttctccttttgcagagattcggtcatgcttccagtaccggattcttgatgtgagaacgattcctgtgcttctttcgtttctcccaaaagattttctagatcctttgctgtcttttcgttaccggtcattccataggcttggctaccacaagaagatcgcaggatatttgcacttttctctccataatcccggattgcttgattaaagtcctgtacggctaagattgtagctacattgtgtttacgtgctgtacctataaatacatctataccttgcaaatttaccgttggaaattcatccaccataaaaacgctcttttgtttgccgggattattcatttgcgacatgacaacgctagcgatacaactaacaggaggagatacagcttctttaattgaaggagcattgcctatacacaatagtgtaggatgatccggattagttatatctagtgaatattcttcttccggaagtggtgatagaacccaaaagatgtatttattgttaagcaaaacaagcggagtctgtgcggaagataccgcaccagcggtctgctgctgtgcgcctaaacgccatgcggttaacatggaagacatgtttagcgcaatttccgcatcctcagagagccatttaaagaccagatcactatctgataatgcaaaagcgattacatggggtaaagttcctattccctttgctcgttctttgtaacatttataagcaattgaatatacatagttaatcgcattgttcgcccagaaatcagttttttccttccatgaactttcaaggtttttcattaaggtagtagcgatattacgaataaacaaggattcgcttcctttagggacatatttttccgaaagtacattaacacgaaccgtccgggacatgtctacaaaatttatgaaagcaaaggctggtgtaggtacattttttctcttaaaatattctatactaccgtatgcgatccgggacaaaataggtgaacccggtttactaggatctccttcccaatcatatacaaatccggcatagttacgctctgcacattgatagatgatgcctttaatccagctttccgattttccagatcccggaccaccgtcaatataaagattttgctgtggcttatggattctaagatttccttctactgtttcaaaatcaaaataaaactctgatttttcatgtgatacaccaaagatagatttatcagataccacatgccgtttaaggtaaaaaccggctgtttggataactagtattgtaaatcctataaatactatcggaaaaactaataaattgtaccatgatagaacattactgaagcctaatattagggctattgctaagattaatgtagtggcagtatatacatatttcaaggattcatctcttctcttttgtacagggaataggaaagccaacccagctaataatactacatataggaatcgaaacataatagctttgcgtaaaaactttcccaactgcaataatacagctgggcttggtgaacaaagatcattcaccaaaacccactgaaagattatcacacccccgattattacggaaagcaatataaagacaaatgataattccttctttgctggttccattattctttattcttgctagagagtaattgaaccttatctacactcatagttactgaagggactgtatcaccagtatcacgcttaaagataccgacagtgatttccccatacacatgaaccatagttcctgtttttaaaaactccgcaacctttgtttcgtaatttaagaaacaacagatccacaacgttttttcttcgtttccctctttatatttagtggaaacattgaatgaataacctttctgtgttttcttggcatctgatccaagataacccgtaacatgacctataaacatacgctaaaaatttaaagataattgtttgacttcatttttattttttgattcggaaaattgtagggaaggagtaggatcatccaactttatattaaatatattctgtgcggcaatatatattttcggatctgcatcctttaacgcatcaagttcctttgcagacagtttatatccctgctcctttaggttaaccaattccttaaacgaaccggctagcgcagcagctagagctatattaaaagctggtgataatttttcatcattccgggtttcagaaaaatccttgctatcatctacttttttattctctatatgcttgcattcttcctgttgcttttcctgttcttccttcttcaataactcatacttgcagacttcattcaaaatcatagtgctagccttacctacatcaactaatacggaatagaggaatttaggttcttttttgatcgctccgagccagttttttaaatactgtgcgttttcttcccggactccggaaacgatacctagagaacggcaagaaacagcagcggtaaattctgcgattaattcttcttttgcatatttgggatcaccaaacatgtttttcatttcacgtcctaaacgggtatctataccggttgaatgtgccatctcatgtaacaatgtgctataaaatccttctcctgtatagaattgacctttaaggggtaaatatatcttgtcctctgaaggacgaaaaaaagccttgtcagagaaagaagaaataataggacataaccatgtaccgtgttttatcatgtgatccaactctggcgatgaaaacattccctgctcatctttcaatttaggacaactaaatttatccttcaatgccttccattgttccggatatacttccgcaaagtttgtttgatcaacattgaacacgtgataaggtttagtataaggaataacggtatattctttctgctcttccttagtcaaagccttataatcatccatcgaaattttattccccttatcgtctttaatcataaaattccaaaataggacaggaaaagccgatgctcctttgtttatgtgaagcccttgtttctttgcttgcggaaaagtcatatatacaggtgtctggaaactacgttcctcttgaagaagaaaaagcatgaaggaattgattccattataaacacgcccatcaatattttgtggtaatccatatcctgttgttgtaaaccaaggtttatgccaatccgcatcgacttccgtaagtttcttaaccataagatccgcaaatttttgcagagccttatcatttgcctgaccatccatgacttattgataaaggtgttcattttcatattttagcaaccattcagcagcgttttccgcattcgggctaactccttcagcttgcatatccgcaacgtagagagccgctaaatcttcttgagctaataaaaattcaagatcgtcaatctctccagtctgattcttttctaccaatttgttgtaatcttccatgatatttatttttaagtgataacatttttactttcggaaaaatctattaattataaatcggcaaacattttatttaccgtattggcgagaggacgctttagatctttttctgcactttgttgaccttgtgctagcttaacatctccgagcgtattagcagagcctttcagattaaatatcttctgaacggctatcatcgtattgccagatgcagtttcattcaaagactgaatcaactctttggaaggttgatagccttgttccttcagttgtgacatctttacaaaatcgcctttctctactgcttctttaaattctttatctagttccggagaaaccttagcactagcaggatcagcattaagctctacctttgcttctttggattcttcctttgcttgtgttacttcttccgctttttgcacttcaggtttcatcccaaatagtttttctataacgatagcttgcgtctgatcaatctttgtatcttgtcccaaacctctaataacttcctctgaaggcttgtaaccttcctctttcaaactagctattttttcatagtcattcttgacaacggcttctcttaactccttgtcaagatctcgatcaggaacaggatccttacccgttactttctcctgatattgttcccggatcttctcgactttaaagccttcttctttcaattccttttcagttgtacctttggcgattattccttctttttctaacatatccccagcctttaacctaatgcgtgcttcaagatcataattatagtttttatccggattttcatctttcagataagataggtattccttatgttctgtggcaaaatggctgtttattaattgctcataccttttatccttcaactcgtctatatcgatttttccggtacgctgcatatcctttagcttatcattaagatactctttatcctttgccatttctcttgcctgtaaaatctgctgtgcctttgtttccgatattttctggatgtttgagaaagcatatcctttcttatccggaagcatagctatatctgtaattatgtaaccttcaggagtgtggatcattttgttatctaaagaatgaccattcgctaaaagatacttatctgctgcggtcaattcgtaatctccaattttagcaggaacagacaattctttttccgaacgtaccaccacagcgttgagatccttatcgacctgaagaagtatatctcctttttttgttgacaagactatcacattgccatcaagtagatcttgcttctgttgcttcgataatttctttccgtaaatgcgatccggtatggttaacgcttccttcctatatataatagaagtaccgtgttcatgcaaccgaactttagctggtttaccattgatatccattaatccggataatacacccttctctaactttgtgcctttcccgtctaacgagtaaccattttgcaaagcatactcatatagttcttttccggtataacagattttatttttatgatcgatcacagtaaaacgatctttggcatcattttttagatcaccccagttaacaatatcaaccccttcattttttaatacgcttttatagtcgggagataaagcctgatcccgattaaagaactggcaaacacgatccatagaagccttttccgcagataaatccggttctcgctttgtgtgtgaacgtatcttatccatatcgatacgaaatacttcgtcattccgggtaaaaagcaaagaacccttgttataggcttctttgtaacctaaactttccgcaatcgccctaaattgcccgacattattatattgatattctgttagaacctcttgtagcttcatgacaattattttaataattcagcggacaatatatattcattcaatatagataatttcatatgccttcccccacctctttcaaacatttcgatctcaaaaaccttatcatccgggatagtgaacttattgaatgctaggacaaagcgattttggcttttgcccaatatctttttatcaaagtctttttgttctaccggatcatacggaacttcctgctggatagagttcttaaccttcttctgatcacgaaggaagcatttaataaaatcaacgtcataatctatatttgagaagttttttatatcaaatacaaaaaacatgaaatcatcttttacatataggtttgcaagggacatctcaaacttattttttataactcccaagctgaagatattacgctttttatagtgcagtttattgataagattatccatctctatgctatttacatcaatgtgtgcaatatatttgcgaccatcgtcaaagttgtaagagtaagtaagagcatggtctttaaacaaggtaatttcataggtattcagatctttatcgataacaaacagattagaaggttcaaaggcatcaaaagttgtaccaactttaaccatattattataatactcaaccccgaaaacttcttcatttccttgtttcagatataacacatctgctggaaaaaacatttctgtagtattgttattattgactattacgttataacaacgtgatctatccacatcaccggcatatacgatatttccgcagtgatccgtcattcccggtaacagataggatattttataagaatagacattcccgtttgtacaaactatgataaggtttgtcgttcctgaaaaatcttcttcctgtgccgttatgcggacaacattaggaacattatccacccgttccacttttacataatcttcacgaccatacgaaatgtcacttacttgtgcaggaagtactatatgtttcgttttatcaaacgaaacataaattgtttgggagtccagttcttttttttcctgtgcagaaatggagaatggaacacaaaacatgattaatataaaaagcaatgttttcattttacaaaaccaataaaaatatttataatccaaagcagaacgaaacaagatattaaactatacatcagtactttcatttctgctatctttttccctttagagcgttctataaagaacctataagccaaaaatacagtagctacagctaccataaaattaagtatatcaattatcattataatgcttcaattagttgggttaaaggattctttttctttggttcattctgctgcatctgcatttctctatacagacgttctatttcagcttcttcttcctctctcttttttctgtcttcattagtttcttccttgatatacatattatagttagcttttaaatgaacctttacttgagaaaggctttgatttaaaatttgtctagtaacctgtgtagtggctgtgatcgcactagttacctcacttgttactgtgccaatagaagaaatcggaagctgcacgccttgaagcaagccctgttccatttttcgagcagcttcagctttcatgttattgggtaaattcaatccctcaatcgcatcagaatcataaatagtaaaagcgacaggacttatatatttcccatatcgtatgttctctaccgtaattttcaaacgagtagagccgacactagcatttccgtagaagatcgtatttgcagggatctcaacgccaccaacccataaaggctctaacaagcgcatccggacagcacttccactaacaatggtctgatctccataaatagcagctttgataagattgactttttggtcaatagtaaactgtgaccggcgacgccgttttccattttccactataaaagtcggctttgaagctttctcaactttaggaacagaatcatttactttcggaaaaatattctcttgagatttctctatatcttttcctgatgcttgatcctgatatttctttctcatttcatcccggaatcttgcattttcttctagctctttgcgtattctttcctctttctttgcttccttgactatctgattaaaggtttcttgatcctcaatatcatttagttgttggcgcattttatcagaaaatgcactgttagatttttttcctcgctccttgtattcgctagtaacttcgtccaatggatctttcttcattttttcaatacgagctttcattttctcgttgtattcgtcttcggatgtctgcatttcaaaatagaaatcgcttccttttacttgtgatttttccaattcacgtttcttacgagcagcttcttcttgttcacgtttataagcatctaccttattagcgatcttcttttctccttctgtgtccggttcaagaaaagcctgattcacttcttctgtattggatgctgattcagccggtttttcttttttaccaaagaaaactattacaaacagtacgcccaaaagcagaggtactaacattaacaatttgtttttgtccttcaacgcttctcttaaaaagtttcccatagctccattattttaatttttcttcatctgttatttctcgtggttccgaatatcgaacgtcccagctttcgattttaacaccgtgagagttttcacgtgatcgagatacatcatatagagtaaagttcacagaaatatcacgtgctacgctccccctagcacgatagccggtttgcgtaaacagtatatccccggatatcggaactgtttgcatattgatatgtatatccttgattataacgccatagcgtatatttttctgaatcaaagaattaagcatattaatatcgttatattcgttgtaaagctcttttcctcgattaccaatcaaattaagagctaatgttacgttattctcataagtgctttcatcgaaggagtaccacagcgaaacaaatgttttgatatgattttcatattcatactttcgcatcgctgcggattcaatggctgcaacatcgtaaacctgtcctgaagtatcaagtactaaagccttcgtataagccgcatctatcttgtttgacaaatagaagaaacagacagtaaatgcaatacccataatcagacaacaagaagatgcaacaatcacagttgttttaaaagcctgatccactgttttaaattttgtaagattcatatttatttattcttcgttatctataacacttttacctaatgaagcagcagcccctacatttgtagccccccctgctatcgctgatcctgcaatcgccatcgttgcagcagcagttacaatagataccgttttagaaatgattctaccggcatcaccatgaccgactatcttacttgccaaccagaaacaacaacaataagaaccgatcaaagcaagatccatgcctaaatattgtagctgttttgtcgcttcatctactgcgttgaatgcgtcagaatcataaattgacttaaatgtaaaccacattatctgatttaaaatattaatcacagtaaataccataccaacggaacacagtgtaccaaaccaattagacagctgcttttggaataccggtagaatggaaaaagcaaaaacgaagggacctaatatgacaaggatctttacaatgacaacgcccaaacccaatatgataatttgtacaatcccgaccagcagtgcggctagagcatgtaagagcattgctgcgaaattggcaggatttaatatttgggagatttgtttcaatgtagatgcactttcatctattttattaccttgatctatattttgtagttctttattcatagcaccttccggatcttcccccgcagcgacttccgcttcaagtgccgttttttcattatcggctatcatggtgtgctgttcttccgctgatctgtctagaaaagccgcaaactcctgtgcccggactgaacttaaagatgttgcttcatttattacttcaagggttccaacaacagtttttgcgataggtgtatatagcgaaagacagaatattaaagcaaaacagcgagctatttccatcaaatccggaaacttattttcatccgatgttaaaagctgactaacaccatgatataggtaattataagctatattacagatgaaacaaataactgctacaccaagcgcaattaccgtcatttgcgcagttaattctgttgtaagggaatcattaatctgcaatccccataaaaaagtatcttgtccgttcataaggctaattaattagtatatcgactaaaagcagataaatttccgctataatatgttttccctacatgttttcgacttgcatcttttatgatctcacttcttactatttcattaaaagatttcatttcagcagaagccgtttctaaggcttctcttacctgtccgacaaaggacattcttccctcactattcatgctgaaatagtcggaaacagtagcaaccttaaataatagatctgtgctcaaattaaggtttaccgtaacttgttggaagtttaaaaactttaaacaatgatagctaccgcctatattcatataaaaacggtaatcactacttagacaagctacatcatccaacagttcagcaagttctactaaagattgtagttggcgtagttggtctatcttttgtaaattttctcgtatatgtgcagcatcaatcatttcattaagctgcttaacccattgcgctgcattcgctccccattcgccaaggttcattcccatgtgagccggatcattaacaacccattgcgcactagccttttgaacagaaaaagagctacttaacagcaacacagaaaaaaataagagtatctttattttcataatattataaatttattatcgcagaataaacactatcgcaaatatcaaagccacaaaccaagcgactagatatgttcttgcattatctttctttgtagctaaagcccagactacaaaaatcagagaaacgcctaacattgcagcggtgatataccctgccacactaaaagacgtattgttaaattctcccgaccatccttttatctggttcaatccttctacagcatcattcatatttttttctcctttcttctaaataccggttaatagcagcataagtagatcctgtttcctcaaaaagctgtttgagcctaaccacagtcgattgtcttgaatcaaaagcgacagcggcaaattcagatacttcattgcgaaaaacataggtttcgtttcccaatttaatgaagaactctctccacttgatctcatcatccctattttgcagactatctatcattactagttcttcttctgaaatagaaagaatatctcgcagattgggcaactcctttctataacttgaatgatccagtattactttagtatcacagtttataagtattgaatccttgatcgccggtggacagttcttcaggaacagtacattttgggcagctatcgttatagccccgtcttttttacggaatgtacgatacaaataggcgataaaatcaccaaacttatcatcacttaaaaagtctagggcttcatcgataatcaattccttattaactccttcacgcttcttgatcttatcgataaccatttgaagcgtgataatcgctaccaaaggaaaatactccttctttgctgcgtcttccatatcaaacgcaattaaatcatcgttaactatatcaatattttcagttgcgttcaacaaaaaggatagttctccatccgtgtaaggttctagtagtaaaagcacttcctctatctcaaatctacgtttttcaaagtcagtcattttgtaaataaatacatctcgcaagaaattccggtattctatcagattaggaaaaatcctttcatttgttccatcaacagaagaattatttacatactcataaaatgcgatcactgattttctaagaatagctttctcggtgggatcgataggcttattttgtttccagatataggataaaagagcacagatcgttttaataagatcctcggctgcttctgcatctgaagtatcaatataaatatatctaccattccgatcacgttcacacaagaacgggttaaaagcaaactgtttctgatttgtagaatcaaaatatttacctcggtgcaggctaatcatagacctgtaagatccaccgatgtcaataattgtaatatcattacccaaagaataagactgataaatatagttgtttagccaaaaagactttccggagccggacggaccgattactattttatttctattgtttaaagccttgttattccataaatttatcaatgcaggatttccgaatcggtcattatacaaatgcccttgcagatcagaaatataaatactatctttttgcaaataacaaatcgcctgtttggtcgtattgataaatcccctataattgctccgagcattccccggtatattagaaaaaaataaattgcacaactccgcattctcgacataacaagaactttggttcataaaactaaatccctgctgtgccaatgaaattttccgaattagagaagaacgatccggatcattgataatcacattaaaagctgtataagctgtttgataatcaaaatccgtaatttctttacagaaaagttcttgctgtttttgcttgtctttagccggaggataaaagttagtcaaatagtttagcccgtttttttcagcattaatagccgttagcgtagtatctgtatctgttatttctatcacaacatttacaatgtgatcgaaaggcaaacctagtccaaccgggtacaacatagaacatttagactgtatattctccggaagctcaatcgtacttccatacgcttttgatttacccgtattgggtacattcagctcataaagattttccccttccacggtaagagaaagcatcgctaaatattcttgtccaaccttcagatcaccgctaggagttaccataattgggctaactgtttcttgagtagcgtcttttgttggtttagcatacgagagattaagataatcaaagacagcattatttaagtctttactatccatcttctttatctcaaattgagttatagaagataacccattttcaaaattcaagattttcggttcaatctctgataacctttcttcatagttcttgtagggctgtttaaaaggataattgagttttttaagcagcgatgtattagaagccttttttcgcactccctttttcaaatctgtattggcaaaagtgatatacaaatttgtatagcagtttattatttgcttgttattaaagtgtttaatactttccgctttcaatggattaacagaaaagtcattgttcttatactggcttacatagtaaaagcactgctgatgcaccaccgttgcaggaggtaacatcttaaaaagcccctctaacctctcatgtatatattttgcatcttcctgcgaaagagtaaatacttccggaagaaacaatctgtatccaatggttaaatctccgctaccgtttactataacgctatccgttatggtctggatcggtagtacagccgaaagatctattgatttatcagatataggaacttcagaaggacgcataaaaagtatggcgagtaatgtaatgacaccacacagtaataatgccgatataataataaatcctatcattttattttgtaattagttaccacatagtagatataaactctctgcaagaaaaagcgacagccttaatctgtatcacgtattccgcaggatttcaagatcatttctgcttcattataaaattgaataccttatgtttatctattatctgtttaggggttgcagatctaaccgataagccagttagataatccggattgccagctttatgttcccgttttaggttcttgaataagatacctgaagcaaagaatatagctcccatgacactaactatgattaccggatgcacatgcttaaatatgcaaacaattataatcaaagcatttgccaacataaatagaccaaattgtcccgacgttaagccaaagaacttaattggtctatttatctttcttatagtcctcattaatcagataataaggaaagctaccataataaccgcaaccgcaatgatccagccgagcagatactccttggcgtggggattattcgttgcaagggaatagatcacaaatactaaagctatgccaagcacggcagctaatacatactttgcgatattaagaatcgtatcagaaccttcttgcgctttcgattcaacatcggacaaactgctaatttttaatgcgctttgggcttctacaacttgaggaacaacaacaaaagtcagcaggaaaagccctaaaatcataataatacgcttgtgtacactaacaaaatctacactctttttcaaaacttgtaccataatcttaaaattttaattgttattttatacatgttatttatatatcaatcttgcttaaagcggaaaaatcaacactttcatatttgacaaaaacatcatctgatttttccgaaagtacttgatgctggaatggtggtatcttaccagcataatagtacgcccggtttgaaatatacatatccgctatctctctacttaattcttcatcatctgaaagatccttttgaaaaactattgttatgcgtggagataaaactagatcagaatcagatttttcttcttcaactgatagtgaagctgtacactccgttttctttttacttccggaaaaatagaccaatcctaaaattagaattgaaacaataactatcgtaactatcgccagatcaaataatgaataattagtggctagatattcagtcatttgtatatttatataagcgaccatattagtataaatattactaatgcaacgatatacgtaattatagcttctttcattttctcatgattagttattattttttttataaccgcaagacctgcacagacaaatccgacaccggctagcatttcgccacattgtttgaataagtcaatcaatgcgcttacatcagctgataataatatcataatcaataaataaggactttaacaccaagattccagactgtattccatttgcttgcatagctaaacggactccaatactgcttaacacgtccaagtatcgcaactcgtggagatacaaagtattctaattcaggctcgatctttaaaccaagtaagaaatcatacttattatcctgcctcttgtacgcttctacacctgtaaaaagacctagacctaggctaaaataaagtgaagaaagatttgtcgcaactgttttgaaataagcagcatcaatatagtaatcttttgctgtagagctaaaagaaactatcgttggaacttccgcagtattgctttcataactgtagttataagacttttcaaaatagttcaaacctattttccagtaagttgttcgactcctatactttgatactgaaaggtttaagttagtattattcctaccaaaaatattcaatccatagtttacttctagggctgaaatacctacataatgccgttgtgcataaacactatgtgtacatgcacataacactagtaataaagttaattttaataatctcatattcagtttaaaaaaaggttcgttttaataaattcaaaaatcaccttctctatatttttcaaaggctatgtacgtgctacttttgccgtaaaaattatgaaatatggttatgcacgtgtatcaactccggatcaatgcttaaatctccaactggacgcattacgtttatacggagtggatcacatctgtgaagaaaaaatatctggaaagaataaaaataagcctgttttagatgctttaattgcaaaattaaaaacaggagatcagcttatcgtgtggaaactagaccgattaggaagaagaacctgcgaacttataaaacttcaagaagctcttgaaaagaaaaacattgctctaattagtctaacagagcaattaaatacatcaacaccaatcggaaagtttgcgtttcatcttttatgctgtattgcagaaatggagcgaaatataatttccgagcgtacaatagccggtttgacttcagcaaaggcaaaaggacgaataggaggacgcaagcccggtctaacagatcaagctaaaaggaaagctaaactagcggctatagaatacaccaagtatctacaaaatgaaataggcacgatagatgatgtttgccggatagtaggagtttccagagctaccctatacaagtatctaaggatagaagggattaacatacagggcagaaaaagataagagaatatttttccgaaagtatattcttaattatctgtctactaactgataatatcaagtttaaatataaaaaatatacttagaaatttgctcaatactatcaaatttgatatctttgaaataaattctaagtaaaatgagtaatataatatctaaatataaagaaacaggcatgataagcatagatcaaccagtaggatataacaccatgaaatcccgtctttacaactggaaaaagcgaggtttgttatcacatattcgccggggagtatatttgccggctaacatacagaacaagtatcagatagcttgcaattccgttgataacggttgcctagcttatcattctgcattagagttctatatgttacagacacaggaatttaactggctttatgtgcacagttctactcccttccggtcttttgagtacctgaaccagcgttatgtatataagcctttgcagtttatatacaaaccattggttacaaaaaaagataccggctatcctatcacggttacatcaatcagccaaaccataattgactgcttaaacaatataggcttagccggtggcattgaagaactgttatttgccttaatcgaggttgatccggattccgtaatagaagaagatatgttagaatgcctgaagctataccaaaagaaaagcctgtatcaacgtacaggattcatcctgtcccagcttcaggaacaactaaacctatcggatatgttcttcgatgtatgtaaaaagaagatgggtaatacaacaagttaccttacaaatccttcccgttgtgatacctatttcaaggaatggaatgtatgtgcgcctaaagatgtaatgaaagaaatagagaaaggagtatattatgagttttgattatacacaagaagaaatcactagactagcaaaagaaaataattttacggttgctggaatagagaaagttatgcgattatccaatatcctcaatgaccttaacaatcagccggagtttagcggtaaattgttactgaaggggggaacggctataaacctgcttgttttcgatcttccccggctttctgtcgatctggatcttgatttctctaaaaacgtatctaaagaggatatgttagcggagagagaacaaatcaacaaggctttagatagctatttccagcagaacgggtataggaagaccgaaagaagtaattttaccctagattctctctctttgcactataatacggtgacaggaagcggagataagataaaactagatataaactatcataatcgatcccatatattcaaaccggaagttaaatctattgagtttcccttcatcagagagaacaagacttcatttgtagtaaactacgtcaatcctatcgaattgtttgcaggaaagataaaggcgttctatgaaagatgtaagcctagagatatatatgacctcttctcccttgcatcctctgatatattgacgagcaaagaagaaagggatcttttaaggaaatccattgttttttactcttctcttggcaatccggagaataaggaaatgttaaaggctgatccaaaacaaagcatagagaatgtgacctttacggagataaggcagcagctacttccgatgatgcataccaacagcggaaaatatcccatgcaggagatcaacgataaggtggctgatttcgtatcttcgctaatgaaattagagccttcagaggaactgtacctgtcaaacttctacgctgggaaatataagccggatcttttgttttctgataaggagatcctgaataacatacaagatcatcctatcatcataagaacacagcaacaaataaccgattctattttttcagattcaataaaaaaaaacgattttacccggatcgctgggctgaaggatgaagggtatatcccttcccctaaaataatagacgagctgaaaaaatccgcaccggctccaacaatgatagcagtccagaagatcttcggtctgtcctctgacgctcccggattaagcaacatcaaactagcccaaagcgataatgtagggctaggtaaagataaaagtaataacctaaaaatctgacgttatgaaagtagactttgacaaactgaaaagggatgtttcccttccggagttttttctctatttaggctggaagtttgtttccggatcttccaactcgtcccctaagatgagcaacggatccgataccgttattatcaagaagaatagtaaggattactatacctattgggacgttcacggagaagcacgaggaaagactatcatagatctaatgcagaagcatatctacgaccagaccgggagaatgcctagcctgcgagaagccggggaagccgttcagaactatgtaaacaataaagaagtcgtattatctcaagatagccggtttggagttagcaacgcaaaactagatcctaatcagctggcgttcctgaacagccaactgaaaccctatcaaggggatttcttgcaaaagagaggaattactcaagatacactatcttcaccggtattttccggggtattcacctctagggaacaccggaaagatggaaaagtctataataatacctgtaccagacttattaaccaaaacggctttcagggtatttcccaaagggggataagacctgaagacggcaagagcttcaaaggcatatcaggcaacaaatacgatagtatcgtagtgtctaagcatgacaagacaagaccaatagagcatatatatatcagtgaaagcatgatcgatgctgcgtcccattatcaaatgaagcttctgaataccgaaaagaacatcttatatatcagcactgaagggaacatcacacagggacaaatgggcgttataaagctgctcctgtcaaagcaaaatattaataatataaccgatcaggttacttatatatttgacaatgatagcaacggctataaatatgcgctgaagctagatacattcttaaaaggtcaagagttacccaatattgaaggtctgccagttgaagaactgaaggataaagttcttcaactgcctaacgtggagttatcggtaaacagtgattggaacgatgatctacaagcatccatatcaaaaggcaaggaatgtgagttccaagatgccataaaaaaaaacgattttacccggatcgccgggctgaaggatgaagggtatatcccttcccctaaaataatagacgaactgaaaggatccgcaccggctccaacgatgatagcagtccagaagatcttcggtctgctctctgatactcccggactaagcgacataaagctagcccaaaatgataggcaaacaatcgggaaaaatattgagcaggcattataatttttccaaaataacaataaccaaatttggttattgtattaagagtcattatttttgccaaaacaaaattatagtcctatgaatataaaatatgaaaaatacttgtcaatggaagatgttccggcaggtaagatattggatgtaatccttaaaaaaaggaatatatctcaaaaaaagttagcgcatatgtcaaatgaatatccgcaacgtatttgtgactatataaaaggggaacgaaaattcactataaaagcctccatttcaatagaaaaagcgttaaacataaacattgaaggctttttctttaaaatacaagccaaccatgacatatataccttcataatgaaagaagagcgaaagaaacatcctgacttatctaaactaagtaaaggattattttgggacacacgaatagataagataaattggataaggaacaaggaatgggttatacaacgggcttttgaatatggcaacgatatcgagatcaaggagattattcggttctatggaatagaaaccataaaacaagtcattcccaacataaaaaacaaatggaatagtaacacaagaaacgataactatcaaaaatacattctatgaacttacattatgaaactgtttctcctttattaaaagaaactctgcaaaagctggtcaatagtcctatttttaaagatttcacgcttataggtggaacctgtttgagcctacaactaggacatcgaagatctattgacatagatttattcactgatatagattatggaaccatgaatacaaaagaaatgaaagagtttattcaaaggagttttccatattccgagaatacagattctctggacacatcagctttaggatatacactatacatgggggactcccctatagacaaaattaaagtcgattttttctatactgaaaaatttattttccccatacaagaaatcgaccacatacgaatagcagacatacgggaaatagcagccatgaaactatctgccattacagaagaagaaccaagacaaaaagacttttgggatatccacgaactaaatgaaaaatattcattcaaagatatgatcgactggggaataaaaaggaacgaatggagtgttacagaggaaggtatattaaatgggtttcaaaaaatagattctgtaaaagaatcacctgaaggaatagattgcttcaagggtaactactggtcattagtaaaagatgatttaaaagaaatggtagatcaatatctaaaagaaaaagacttttttcttgccataaaaaaaaatgactttgcacagatctctttcctaaaggatgaaggatatatcccttctccggaagcgataaacaacctgaaaggatccgcaccggctccaacgatgatagcagtccagaagatcttcggtctgccctctgatgctcccggattaagcaacatcaaactagcccaaagcgatagcaaagaactaggattaaacacagaaaaaagtatctaaacacagattttttccgaaagtataataacgggatcaaacaaccggctaccagagtacccatgcaggaatatatctttccagctggtaagtgcttgcacctatcagccggaaaggtttattccgggtactccttttccgactgttcggatcggtgaaagtcattcggtttaccggatggctcaccgaaccgatcaatcggaaaatagcctaccttattcgggtgggtgggcattatgcgttaaggattgaagcgtttaccatgtagaagcggaaagcctgaccgaagggaacgcctaaaacataaatatcattttgctactctcctactccattttatagctggatctgtccttatgctcaactgtggcaatatcattttgtacaatccggaagattgatttttgattttttagacagatatcactatcattttgctttttatatgtgcaaaggtcagaagcccccagagaaaaccccgccggaggcaattatagaaagtctgtgtatcgtttccacaaaatgtggaaatgatacacagataacagttcttcaataaatatatgtgttttttgtatgcttttgattatcaggtatatatgacttgtttgtttgtttggcacaatgtttgttctttgtctttcagaaaccatatgttaaatatttaaatagattggattatgaaaaaggtattatttgcagtagcacttgttatgggattgggtagttcagtggcattcgccggcaacatggtatcggatgttgagattgtggtaatggtgaacgattataagccaatcgaggtaaaggatctgccgcaggcggttcaggacacgatcaagaaggatttcgcagacctgacaatcaaggaagccgcagttgaggaaagcgaggaaggcacaaagacctacaaggtgacatttaccgatgcagaaggcacggacagcgaagtgttcttcaacgagaagggcgaagtcctgaaataaagcaaatgaacagcaaaaaagagaattcaattaaactgtgtcagcaaaattaatattttattgctttgctgacacagtttgttttacagcccctccggttccggtgacttgtaaggcttgaaagcaacccgaacctccttatgctcatcgatgacgaaagtctgctccggctccacagaacgaataatgacgccattgactttccaatacatgattgtccatgatttggaatgggtagcacgaaaatgcaccgttgtgcctttcgctatttcagccggagagatcaattctcctatcttttccgcagccgtattttccaacttcggtttagccgaaagctgaccttcaccctgatccacaccaaatgccagcactactttttccactgcgggaggaagaggaggatcttcatcattgtcacaagaaaccgcaaatagcgtaagcccatacaacaaaacaacgacaaaagagagataaccgatctgtctcattaagccggtttcttttttttccatagcagttttcataagcttattttttgtttaccctacgcaaagataacaatttgttggctaaaaggggttattaaatatagtgtttatcacttaatgaataaaatttaaaggagacaaaaatgccacaaattcttatagacagaaaaacatgttctaaatgcaatacttgcgcaactgtatgtgtaatgggaatcattgataaatcgacagccttaaattatccaaccatacctgaagaaaaattggattattgtttaaaatgtggtcattgtgagtctttttgtgcacagaaggctcttaccttagatttccttcttgacgaaaaaattaatacgtcttttttggatagtcagattgaaccacagaatatagcattgtatataaaaagtcgacgttctgtgagacattattcttcaaagacagttaataaagagttaattgctaaagttattgatatagcccgttatgctccatctggagggaatggacaaccagtaaaatggattgttattcataaaccatcagaggtaaatcgtgttgcaagtttaaccgttgattggatgcgaactattcaaaacacatcacatcctctagcagattatgtacctgcaataatttcaacttgggatagtggtttggatttgatttgccataatgctccccatttactttttgcacatgttcctattgagccaattgatgaccctaccgaagcaattattgctttgactcattttgatattgctgcgcccgcttttggtatcggtacatgttgggctggattcgtaaagttggctatagacaattataaaccattaaaggatttgttatcaataccagaagaacgtaaagcggcttgtccaatgctatttggatattcaagttataaaataacttctattccgagacgcaatcctgtggatattacatggaagtaaaatagaagttacttaatgactaaaatggtgtattaaacagttaatcttgattcagtaaaaaaaataattttgttttactgaatcagactctaatcaactaacaattaagagggatggtttttttcaggaactctctccaacatttccaaaaaacaacattcccattgttttgcagccaaactaacaatttgacaattaagatttattccatatttatcagcaataactctgacttgactttttctgaatattgtctttaatacagttctggctggcaaatcgggtttttgcaacaagaaagtgagaaaattcagatattttcttttcaaccttaattccgcaacactattataaattaaactttttaagtacctgagcaacaaaaagttgctcaggattttgccatgtcagaattttcacttatcttagtgttgcaaaaaaaacaagagaatccgacgatagacatggcgaagatacaaattaaatctgagagactcactccttttgggggattattttcaatcatggagcaatttgactccacattatcatctgtaatcgactcaaccctcggtctaaggtgtagatcgttcggttatcagtacagcgaaatcatccgttctctcatgagtatctacttctgtagcggttcatgtattgaggatgtcactactcatttgatgaaccacctctcgcttcatccgacacttcgcacttgtagctctgatactatcctcagggcgataaaggagttgacgcaagaaaacatttcatacacatcagatatgggcaagacctacgatttcaatacggctgacactctcaatactttattgctcaattgtatatttgcatctggccaactgaaagagggtgagatgtatgatgttgatttcgaccatcagttcatagagacagagaagtatgatgcaaagcctacatacaagaagttccttggttatcgccctggcgtggcggttattggcgatttgatagtcggtatagagaatagcgatggtaacacaaatgttcgtttccatcagaaggacacgctgaagaggttctttgcgagatttgaacagaatgggctcactatcaatcgcttcagagctgattgtggatcatgttccgaggaaatcgtggaggaaatagaaaaacactgcaagtccttctatatccgtgctaaccgctgcagttcgatctacaatgacacctttgctctcaaaggctggaaaactgaggaaatcaatggcattgagtttgaattgaactctatccttgttgagaagtggaaaggtaaggcatatcgacttgtgattcaaagacagaaacggatggatggtgtgcaggatttttgggaaggagaatacacataccgttgtatcctgactaacgactatgattcttccgtaagagaaattgtcgagttctataaccttcgtggaggaaaggaacgtatcttcgatgatatgaacaatggtttcgggtgggacagattgcccaaatccttcatggcagagaacacagtgttccttcttcttacagcacttatccgtaacttttacaaggccattattcaaagacttgacgtaaagaagttcgggctcaatgcaacaagtcgcataaaagcgtttgtcttcaggtttatctctgtaccagccaagtggatcaggacatcaaggcggtatgtgctgaacatctatacctgtaataatgcttacgcagatgttttccagactgattttggataatgcctacaacttatgggaatgatattgtgtattgcctcaagtcacattgtggggtaaggggatattgtaggcagaagtgggtgcttcaagttcaaattatctgcaaattcagtaatgagaggacgtgtaaacgcaataaggacgttcaagggcttagttgcggatttgagg

SEQ ID NO: 589 - DNA, 8329 bp, Bacteroides ovatus; identical to SEQ ID NO: 5
  source 1..8329: mol_type = genomic DNA

SEQ ID NO: 590 - DNA, 5513 bp, Bacteroides ovatus
  source 1..5513: mol_type = genomic DNA
caccgagatacaccgccatgagcttttcggctgtacaggtgaagagatggtgcaggagatgaaaccttactttgttgattttccgaaggtaaagaacaactgccttcggtttgaggtcagcccttcagtggaagaaagtgcaggcatgaccgatgcggactgggtgaagctcggcaacgacttcatgcagcgcatgggcttgatgaaccatcagtacatcatcgtgaagcacagcggaacggagaagaacagcagacaagcccacctgcatatactggcaaaccgtgtgtcgttatcgggagaactctacaaagacaactggatagggaagagagcaacggaagccgccaacagtatagccagagagcggaacttggtacagtcaaaggacataggcaaagccaacagggaagagataaaacaggctatggacggtgtccttgcaaggatgcagggatttgaccttgccggattcagccgggaactcgaaaaactgggcttcagggtaagggaagcccgtgcaagtaccggcaaacttaacggctactatgtaacgagccggagcggaacggaatacaaggcaagcgagatagggaaaggctatacgcttgcccacatcgagaagacacagaaaaaattgaagtataactcaatcagcaggaattatggaaacaccctcaaacccaaagacggaggattacacctataagcagggacagtacagcccccgaaagagaaaggacacaacgcccaaagtaaatccgcagcttgcggtagaacttgtgtttcaagaattgaagcgcgtagaagcctatacgaagcgcatagaggacgcaacagccaaaaaggtagaaatagacagggaaagccttgaaagtgccgaaaatcgcctaaaaaacgtattggcggactttgaacggcagggaaacagaatgaaaaacggcagctatgtggacaagaacgcttctatgtattcaatcctttgtgctgttttctccctattgttcgcctgtctgatgtgttacctatgggtggatgcagccaaggacagggacaactacaagaggtattatgaatattatcagcaggaacaaacagaaaagcaagaatgaaatttcattcttgcttttctgtgcttatattaattattcttaggtaatgttccatatttccatttaatagctgaacatggaagaaatgcccctgctttttgaaatgtaccatcaacttttatttcaccagaagcaatgtggattccaacggctcttttagtatttgggctgaatatcaaacctccactatctccatcttgtgatttatatgttgcaactgcaaattcggtaaaagttcttcctgataatttcgttttttctacaataattttgcctggaccagaatgataaaatcctttaagggctatcatattgtctttctttacattgtcataggttccgtccacaatttgaatagttgtattgttatacttgaaaatattggatgagctaactttatcaacaagagtgcatacagccaaatcatgtcctgtaacatcgcactcgatacactctcctaactttgttgttaaatcttgagtatctataatcttattaccaacagccttgactgtatgccctgcggttacaatacacggttttgttttgtaaacacatcgatagcctacgcttcctccaccttgggcacaataaaaatccgcacctggtatcatgggggttggggttatagctaaagaactggtttgtttattgctttctaaagaggtgtttccttcagaaaaagaaagttgccaaaattttattagcggtgaattaattacttcatttttgaaattattgatgtttgcttcggaagcatcttctaacataacaacgacctttccgtctttaggatctatgccgcaagcagaaatacccaattttttccatactccaatttcatctttgctattaataaaatctctaacttgcaaaagttcattcattgtattaacgccctcttctataatgaatagatggcttttacatctttgttcaaggtcttttttataatcttttatatttgtgccttttacttttatgaccaagataccatctttaaaatagctgccacaataataatcagggtaagaaacttgctcaccttctgctcttgcttttacttcaaaagatgattctaaattattaataatatcatttgtattattctctacaggttgattttcttcattcgttggagaatttaaatcagtatccgaacaagaattaagtccaaatccaagaaataaaaatgcacttaaaaataaaatctttttcataagctcttagtttaaagttatcagccataaaattagaaaataattggtctcgttgttctctgaaacaggattttaactatatttctttgagttttctcttgatagcgccaataacatatcctttagggttttctgccagccgtgcgcctttcttcaattctcccaagaatcccataaaatcggggatgcggttctgcccttcaataagggttttcttgttcttgttgatttcatcagacttgaaggcaaaggagaatttaaggtagtcatatacgttgttttctaactggagccgtgccgtaactttagccattcgtgcttgctcctgtagtgcagggtcttctctatcttcaaagaaaacagggaacagagtccatccaataaccttcttcccttccttttcctccttagccacaaacgaataaggagagaacttgtcaagttctttttttgcgacatcaataacctttctgcgaaagtcgtttaccctttcatatttcccttgtagattgaatctttcccgaagcccgtcagaaccttctaacggcacaaacaaaggtgtagtttgtcctgacatgagttcataaaatcgcatggcataaacacttttgaatttcatagcggttacaagttcatattttttaaaacccttagtgaaatcaagagctgctctccaaacaggctcatagacatggaaagtggcaacgcctgtgcctttctttattttggggtgctctattatggctgtatagaaccaaatctcatcatcttcatactccgcccccttttttgaaagtgaggtaaatgcagcctttgctttggtatagttgttgtctgtttcatctcgaagtatatccgccacaggcatagtgatatttacaccgcagtctgtcggctcgattttgtgcatatggtctttgattttaataccttccaaccatcgttgggcaaattcgataagacgatatatgatacgcttttcgtaaggactgaaatcgtatttggcacatgtccatatataggactggaatacggctttgtttggtaggttttcgctcataggacttgcttttttagattgttgcgtatgggtcaagctccttaatacgcctacacaaataatcgaagcgtttcttagtaagcggtgtaagtgtatagaggttctcgccatcaaaattctctccaaagataatgtcgtccacccctatgccgtgattataattctcacgcacgcaatcacgcagaatccaaaggttgcgcaggttcacccagtctgccgttttattcttgattctgctgaacagcacagcagctgtgtagaggtagtgtccgcaatggttgtagtcatgcagtaccagtttcccttgatagtatatgtcgaagtctttgctttcctcatcttcctttgtatcgcagtagaagaacggaatatctttcagaccgtcccaatcaatgtaagtagttggtttcatatagtgctgttttataggtttgcagcaaatatacgaataaagtacgacctcaacaaataaaggtcgtatattttattctttatgtcgtttttaaagtgttaatttttattctttatgtcgtattaaagtattctttatgtcgtacttggagggcttttccctcgcataatgcgcgcgcgcgaggatagacatagatagtcgatgttaagatagaaacaggctcataagattgagattgcttccaaactttcggaaaaaacggatgaaaaacaaaagggaaaacaaagacaaagcccccttataagggggttgggggattgtgcggttattgaagcttttccccccgcgtgttaaagtatattaatttggttacaatatcggtagcaatggttacatttgtatcacaatcaaaaaagtttaagatatatgcaagtaattccattgagcaaatttcggacgaatcagacagcgacccttcttcgtgctattcagggagaatccgtctttctgacttcacgtatcggtgattttaaactggtgccagtgtccgtagaagaaaaaatagccactcgaataagagagggcttgaatgaagtgaaacgaatcgaagctggtgagcagccagccaagagcgcaaacgcatttcttgatgagctttgaagtaaagactaccccacattttgagagggaagcgaaaatccttgcaaaaaggtataagtcttttaaggctgacatgaaggattttatcgagtcattggaaaagaaccccatgcagggggatgaactgagcccaggtatccgtaaaataagacttgccattgtttctaagggaaagggtaagtctgggggagcacgtgttatcacatacacgatttgtgcatcggaaagtgaaggtcgtgtttatcttgtggatgtctatgataagtcagacttctctaccgtaagtgtatctattctaaaaaaaatcatatctgaacagggtatcctttgaccagtcagcgttagtgaagcgaactgtgttttttttctcttttcggtctgcaaaggtaactccacactccgaagccgtcaagggcttcgcaagttcggatctgaaaaaaatcctgagcagcttcgctgtgcggttttttccgctcgaacccttgaccgctctccgtgttccgttgtgggaatggcagggaaaaaagaaaaaagtgtgtggctatgcagtgtgttagcgctgtgtgtattcccatgcggtatgtgtatatatagcaagaagtgtccttgtcggacattcttgcctttatcgctttgctcaaaaggattttaagattacctttgcgacatggaagtaaatcgaacagaaaagataacattccgctgcactgcacttgaaaaggcggcacttgcggaacaggcagcccgatgcggtatcagcacatcggagtactgccgtacactcgcactgggcggacgacccaaagagaggtacacggaagaagaaagggaactgtttcgggagatagcccgactgaaaggaacactccagcgtctgaataactacttcggtgggcgccagtacagggaagtgttcgaggagaaccaggcactaatcaatgaacttaaaaagatactttcacgatgatagcaaaaggaaagagcatatctcatggcacggcagcactggagtacgaccttgccaaagagataaacggggaggcagcagc

SEQ ID NO: 591 - DNA, 4785 bp, Bacteroides ovatus; identical to SEQ ID NO: 6
  source 1..4785: mol_type = genomic DNA

SEQ ID NO: 592 - DNA, 4344 bp, Bacteroides ovatus
  source 1..4344: mol_type = genomic DNA
gtcaatgtcaaaatccttttccctgacgttcttctgttcaagctgtcggcggtaatcatcccggacaaactcgtagaacgtgttgaagcagggtgttaccgacctgtcacccgtgatacgttcgatataggcacttaccgcattggacaacgccacttcttccgaccgcttcggggcttcatcgtcccgcttccaaagggtgagtatcagggtcttgatactctctttcttctcgatgtcaaataccccgtcttcgacatagaacgggttgaacgctatcgggttctcgttggtgtaggtgaaataaatcccgtcctcgccgtgcgtgcggttgtggataagctgggacagccccaagtaactgttacccgtatctaccagcagcacgtgcgcaccctgctcgtaatactggcgcaccatgtggttggtgaagaaagacttcccgctaccgctcggcccaagtataaacttgttgcggttggtggtgatgcctttcttcatgggcaaatccgatatgtcgatgtgcagcgggcgaccgcttaccctgtccaccattttgataccgaacggggaaagcgaactcttgtagttcgtttcttccacgaacaggcagagagcctgccccaagaacgtgtagaaactttcctctgcggggaagtcggcttcgttgccgggtatgcccgcccaaaagagcgtgggcgtgtcggtggtgttgtggcgtggcttgcactccattagcgcaagctggcttcccacatcgttgcgtatgcgtttgagttcgtccctatcgtcactccatgccatgacgttgcagtggcagcgcaccgaaataagccccttgctgtgcgcttcgttcaggtactcgtctatccactccttgttcacttggttggcacgggagtaacgggagagcgattgcatgttccgggcggtctgctcgaagttcttcaggttttcggcgtggtcgtctatgaagatgaactggttatagacgtggttacacgacaacagtacgcccaccggggcggcgaatgacagtcggcagtcgctccggtcagtggacagcttctcaaatcggcagtccgtcccgacctttccgggcaaatcttccacgtcagagagcgtgtgcaggcacagtatgtcgtccccgacacgcatttcttccgggtacagcccgatgtctttcaggcaggtggtatctgtctgcgagagcgagaagtatttctcgatgatgcccgcctttccgtcttgcccggtgatttccgatgccgccagccgggtaagggtgacaaaaccgctgtcgttcataatcctttcaaactgcccgaccgcttcgatgaactttgccgccgcttccttgtcggctatctcctgcggtacaatcctgccccggcagagggtggagaagtcgctctgtcggcggcttctctcccttgtcgttttcgtcaggaacaggtagcagtaatggttcaggaacgggcgttcattgaagtgccgttcaaaggagcggcttaaaaaactaagctcgtccctttcggtgtcgggctggtagctctccttgatgaagaagtcctgcttgtgtactatggagtagtcgggcagcaccttgattgccttgtaccatgccgaatgtatggcttcgtactcggcactggtgacggtgaacagttcgggcagttccacccggaaagccaccgttatgtctgcatcttttgaaatgatgcagccgttctccaccgccaaaagtggaaattttctttccagcgtggtagcctttaatgtattcctcatgttctttcttcctttcttcttttgtagttgaacagccggggtatcgcctttcggctgataatgaagcgtgggtgtcttttgcgtgcggctgctttcatcagcccgtgcgtgccgtaccgtgcgttgagccggaacgtctgccacacgagcagcagcgaagccgacacgatgaaaccgatacatagccactggttcacgcctgccatgaacaggacgatgaacaccacgaacacggcgagcaagccgccgcaaaagataaagaggtactggctttttaaccccttgaattccactggcttcccgatacccctgtttaccggatattcagacatagccgctggtttagaggaagaacgaccgcaggatagtggcggcaacaattaaaaaaatgcacgccccgaaccaactggcggcggtctttgaggtgtcggggtcgccgctcgaaaatttgttatatacttttaccccgccaatcaagccgcagaccgccccgattgcgtacaccagttttgttccggggtcgaaatacccggtgattaggttcgtggcttcggtgatgcccgcttgcccgttgccctgtgcgtaggcacttaccgcagcggcaaggatagccgccgacaaaaagattttctttctcattgtgatttgtttttaatgccgggcggcgggtgggaagtccgcctttcccggctggtgaataatttgaaattttagtggtcggggatagtcccgtttgtctgtttggttttcaggttgccaatcaaccgtagtcacgttgcttcatattgttacacgttattatattataggaaatcgttcatgtcgaacgcttcgtgttccttgcttgtattgccagcttcggcagggacagcagccgtagccagttccgcttcgttgcgtcccagcagttccgccacctttgccagcccgccgttgatgttctccaccaccgcatcgtagaggtttgtcccctcaatgcttgccagtgtcccggcggtttgccgtttctccgcttcggtggggttgtcggcgttcgccgtgcgtaccgcttcgcccagttcatcgaagctcacgcccgtagcccgcccggtatcatcgtcaccgtccatgtacccggctatttcctcgtcctcgtagtcgggttcgtcattctcgtaaccgggcgtttcttccgcttcggctgctgtttccggaatgttttcttccggctgtccgtcagcctgcggcgcaaaaatagtatcattttcagccgcttgcgggaggtgtcccgatttgtcctgcgctgtcccgattagtccgcccttgtatcggctttcacctatcagcgtgtagcccgaaaccccgtttcgtgggagtggcgcatcatccgttctgcccggtgatgtccggctgtccgtgtagcgataccatagccatagggcgatatagtacaccaaaatcccggtaagtatgcaatagattaccatagtcagacaggcttttggaagtggctttcgtacagggtgtttatctcgtcttggtactgctcgaagtgccgcagcagaatgttttccacgtagctgcttaccgtcaccttgcgcccgcctatcaccgtcacgatacgcatcagcttctcgtgcgtggtacggctcacgtataagggctgtcggtctgccagttccactttctgaaagtaagtttcccggtagtcgcccgaaccgcccttgcgcttgcggggtgtcggtttctctacttgcaccgtttccgtctgctgttcctcttgggtgacttgtgatgcaagattggtatgtggtgcatcattcggtttattatcttctttactcggtacaccttgcgaaataagttcccgcataaaatcctcgtctatcttcggcatcccgccgctttgctttgccatatcattgtaatttgatgtagtacactatttcggttatcagttcttccaagttgcttccccttaccagcgggcggctggcgggaaagagcgtggagcggaacaccgcctttttatccgccaccagttcctttttgtagcgtttggtatcggggataaaggttttcatcagcggcagttccagttccttaatggtcttgtcgtaggcggtgtaaaggtctgttttctccctaccgtccaccatattccaaaagaggtacagcccggcaagtcggcaggcttcattcctcaccaatagcttttggatagccattgcgaacgacaggctgctttccagcaccaccttgtcggctgaaatgggggtgaaaatgtagtccatgcccgcaagggagtttatcacgccctcgctgttcaccgtgccgggcaggtcgaaaaacactatatccggcacgtgtccggcggctatatatccgtcagccgttgcaatcgccttttcaggcgaactgcacagtaccgggtaggctttcttccccagccgggtgaactgttcatacgccattcgcttgtaatcttcatccgccccgacctgctcggcatcccgcttgcgcatcccggcaatggagtgttgcgggtagtcgcaatcgaccaccgccacatcg

SEQ ID NO: 593 - DNA, 2877 bp, Bacteroides ovatus
  source 1..2877: mol_type = genomic DNA
aacaccctcccgtcccccaagggggagcgaccaaacggcagcactcactcaatggagtgttgctcaatgttaaacccttgtttctctttgcttttttggggttgtttttctattttggggatgagcatttcaacaacagaaggtttttttcataagaactgaaattttaaggttgcattaaaacgcaaaacttacccaaacgtggacgtggagagcccctcttttgaaggggctcttttagtttcattttttgggtaatttttgaaagtgcagaagatgaaagaaaataagctaaaaaatggcatttttgggggtatttaagagcttaagaaagaaacatagcataagttattgataatcaatataggcgactttcatactatgaaagtgggactttcatagtaagaaagtgaaagtttcataaataacacattaaaagaaactattactttcattttttactatctttgtgaaagtaataataacattcaatgttactgttactatcaaaaatcaccatgaaaatgaaagtagagtatgacaaagcgtaaactatcagatttcgagcttaacaaagaaaatccctttgcaaaacaagcattagttaatatagggagtgcacttgtttctaaatcagttaagggaacaaataaagatgaatcagccattctaaaagcagttgacggtaatggggaaattcttggtaattctgtatttatacgaaataaagccgtagatacagaaagttttgcgaagttctttttagcaggattcaaggctttttttgatttaaagcctgcatcaatcaaagtctttaaatatatccttggccaactaaaacctaatcaagacagctttatgttttttatggacgaatgcaaggaagaaacagggtattcagaagtatccatttttagagctttaggcgagctttgcagtgccgaaataatagcaagaggtagagcggatattgaatactacataaatcccatgtgcgtatttaacggtgatagggtaacattcgcaacaacttacattaatgaaaattatccacaatataagacgacatcaacaaagctgaaaggtacaatagatgtgatgaaagaacaaggagatttaccacaactgccttttgaggactaaagaacagcaacactccattgagtgagtgctgccgtttggtcgctccccctttgggggacgggagggggataaacaataattccaattaaattattatatttgcagtatgaaaaaagaattaggaaaatggctaatggacattgccaagtatataactacggcagtcgtgctttcttcaattttcggggatgtgcaagaaaagtgggtaatatacgtgggaggttcgttgtcaatagtagtaacccttttagcaggtctttggcttgttaaagacaaaaagaaaggagaataaacatgggagcattggtaatgtttggacttgtttcagtaatagccattgtcggagtggtttacttcaaccaccaagacaagaaagaagcccaaaaagcaaaataaggaactaagggtaaacgtagctcaactggacagagcactcaatttttagaggaggggttgcaggttcaaaccctgccgttctacccttacatacatcaagccgctggagatgtcgggaatccgtcaattcactccagcggctttttaatgtcagcagctctcccgtatcggtcggctaccgtttggtcagcagcaaaggtaggcaaagcatttggaatttccaagcgttttgcctacttttgttgtgcgctttcgttaatggaagtatagcccactatacttcgttccgaagtgtgggctttcggacaagccgaaaggggagggcttccgccctctttgattgcattactaaaccaaaaaaacaatagggaaaagaaatgggattcgcagtacttcacatcgaaaaaggaacagccggtaaagccggcggattgggcagccatatagaccggacaaagaaagtcctcaatgcagatccgaaactttcggaaaaaaatctattttaccatttgggcgagaatgggaaagtctatgtctatgacaatttcaagaaccgaaggtcattacaggaaagaatcaacagacgcatacaggagggttacaagggaaagacagccatccgcaaggatgccgttacccacctgaatgtagttcttacaggaagtcacgaggaaatgacagctatcggggagaatcccgaaaggctcactcaatggatgaacgagaactacaggttcgtcagcgaacggttcggggggagaaacgttgtggacttcaccctacatatggacgagcggacaccgcacattcattgtgtcgttgtgccgttaaccgtggacggcagactttccgccaaagaggtcatgggtgacagacgcaagctgtcggagttgcaggactgttacggaaaagtcatgcagaacaaattcgggcttcagaggggtattaaaggcagcaccgccacccatgacagtgtaagggagtattacggcaggatagaggaacggctcatttatccgagtaacagtatggagctgaattacgaaacaagagcaccccaaatcggcacaccgccattaatcgggcgtgaaaaatgggctgagaagcaaaataaggcgatttacgaggattttacccaaatgagagagcattacaagcacgaagcggagaaacaaagccagaaagttctaaaatacttccagaactcgaagctgcaagccgaagaaaaggcagaccgcttgcgaaaagagaatgcacagcttagaggggttatcgaggaacagcacaaaaagctgcatcccgaaaggtatatcagacataacaaaggctattcgcttt

SEQ ID NO: 594 - DNA, 2783 bp, Bacteroides ovatus
  source 1..2783: mol_type = genomic DNA
ggttttcgggtatattctaacttgcatgaagcctaagaatgatatgataattttcgataggcgaaaatgcttagaatacacccaatacaaatcagacaaagccatatacaaaggattggcagagctcgtacaaagtgaaatcatagcaagaggtccaaacgaatataattggttcattaatccgttgattgtctttaatggggatagggtttcatttacaaaaacatacgttcggaaaaagactttagctgcccaaaagaaagaagaagcagagaaacgacagttatcacttggttttgatgaactgtaacactccattgagtgaagctgccgtttggtcgctccccctttgggggcggggggggatagataaagttcctctatgtaaagttataatgggggatgaaaggcaaggttcgctaaccttaccccgattgtttatgcttcccagcattcaatctatccccgtttatgggtttctctttcaccctacaaagataacctcatgggggaaaaatgtccaagaatatggggtaaaaactatcaagtcggtagaaaataagtatctttgaagtacatttttagtagaggtattggtatgcctagacgaagcagataggcaaaaataaagccgctggggatgtcggatgtccgtcaattaactccagcggcttgtattttggtaactctcccgtatcggtcagctaccgtttggtcagcaacaaaggtagtactttattgtcgcaaatccaaatgttttcccctttatttgtgcatttacaaaacattcactaacttcgcacctatgcagtatggtgatagcacactagcaccctaaagggtacgtgtgtaaggggacaagcccccttaaccccctgtcagccggctgtcaccggctgttatcgattgtcacaaaaatgttaacttatgggagcaacaagtattcatgtacaagcagtgaagccggggagcgagattcacaactttagggaaaaagagttggactatgttcgtccggaacttagtcatttgaatgaaagctgggttggagatagcatctcccatcggctggagagtgcgaaacagagatatttcgatacggttgggcagaagatgcagactaaagcagcacccatacgggagggggtaatagtaatcaagcaagaaaccaccatgcaggaactccagcaattcgctgcggtctgcaaggaacgtttcggtattgaagcgtttcaaatccatatacacaaggacgaaggatacatgaacgcaaagcaatggacacctaaccttcacgcccatgtagttttcgattggacgcagccgaacgggaagagtgtgcgtttatcgcgtgatgacatggcagaactccaaaccatagcatctgaagcactgggcatggaacgtggtgtttcttctgatcgcaaacacttatcggctatgcagtacaagaccgaatgtgcgaaagaacagcttcaggaactatccaacgatatatccagtgcgttagacaagcacaaggacgtgcaaaaccagcttcttcagcttcagaaagaactacgttccattgaaacaaagaaaaacgtccaaaaactcatttctaaggcttcagagaagttttacggcttgatagggaaaacggttaacgatagggaaaaagatgccttaaaagccaaaataaaggctttagagggggaaaatgaacagctatccgatagactgggaaaggctatacttgaaaaagagcgaaacggcacaaaggtattcaaagccgagaacgacaaggagtattatagacagcaaatggacaatgcaaggacaaccagtaaccgactaagaacggagaaccaagaactaaagaccgaaaccaaggaattgaaaaaagaacttggtaagatgaaagacttgttcaattccgaacaactggaggctttaaggcatcatttcccaaacatatcaaaagctatggaagaggggaaagacctactcaagcaaatcaccagaagcagaggtttcggcatgggtatgtaaccccccccgcccccaaagggggagcgaccaaacggcagcttcactcaatggagtgttacgccgttcgggttcggaagaaattttgcagggttcgaaaaacggttgtgtgcttattcgaaaaaaagtttatggtgtgggcgctcgtcgggacgggtggtcccgccccttgccgctgggcgctccccgaccgatgattttttaagtagttgattatatgccgtttttagggtataataagaacttaagaaatagaataagttaagtagttgatactcaatatagggtattttccatattggaaaatctgattttccatattagaaagtcactctttcctattagatgttaaaaaggaaaatatattttgcttttttattgtattaatggaaatttaaatattcctttgtggaaaatcaaattatactttttcaccgatatatagaaagtcaaatttgcctaaatagaatgtttatggaaaataagaaagtactcaaattaaccgattttcaaaaaaacgaagaaaacccctttatgaaacaagcaattgaaggaattgaaaatcacgttgttaagaaatacaaaagtagtacgggaagtgataaaaaagctgtagttgctgttgctgatacagatacaggagaagtattcaaaacctcgtttatccgacaaatagaagtagatgaagagcaatttgcaaaactataccttgcgaattttgccgcttttttcaatctatcacaatcagctattcg

SEQ ID NO: 595 - DNA, 2408 bp, Bacteroides ovatus
  source 1..2408: mol_type = genomic DNA
ctggctgtgacatgtaagttttgtatatgattgtttgacgttcaattccacgagttggaaatagaatgattaaacctgttgttccgtcaacagtagcctatgggaacgtgcgacattaagtaatgaactcgtgcgtcaacagaaccaacaacgtagcccttcctaaaggagaagtctgaaccgcgaggggatgacaactgccgttagtatcgaatggcatgggagctaggctgaatggtatgaataatgtaatgtgaaccgttgataaacgtcgtaacttcgaatgagccgccaatgatactgggctctaacccaaaagggacgcagtcagataattccctccagcatggaattacacggatataaagactgtcggcggatagacggattctaacccattcatttgtcatatacaagaaacatggtaaacccgtacttctcctgtgtaacagcaggtaagcagaccgtaagtgaagccgaatggagtgcgggcagaggaatgtggaaaaagcgaacgccatcctgtaacgggacggatagaggttgaaacatcacctcacacgaaagtgggcagacttccgcatggtggttgttttacaagaaacttatggaacttatgaaaggagaaaagcaaatgaacgaaattcaaacatcgtgtgcatctactgaccggaaatggaacacttgggaaagcatagactggaacaagtgtgaaatggcggttaataagctacaagcgcgtattgtaaaagctcaaaaggctggcaaacacggcagagtaaaagctttgcagtgggtgctaacgcactcgttttacgctaaggctttagccgtaaaacgtgttacatcaaacagaggcagtgacaccgcaggcgttgacaaggtaaaatggtcaactcccaaagccagattcaaggcaatcggcgaactgaaaagaggaggctacaaaccccagccattaaagagggtcaatatcaaaaagagcaatggtaagttacgccctttaggtattccaacgatgaaagacagggcaatgcaggctttgtatctgcttgcgctggaaccagtatcggaaacaactgcggacagtaattcctacggtttccgtaaagagagaagtactggagatgcaagggaacaatgtttttgtgtccttgcaaagaaagcttctcccgaatggattatggagggtgacatcaaaggttgtttcgaccacatcagccatgaatggctactgaacaatatccctatggataaagtgatgctgcggaaatggctcaaatgcggtttcgtcttcaacaaggagctattccccacggaagagggtactccacagggcggtatcatttcaccaactcttgcgaatataacactggacggactgcaaactatgcttgcagagaagtatcacaagaaatttgtaaacaggaaaacgatctactatcccaaagtacatcttgtacgctatgcggatgattttatcatcacgggtagaagcaaggaagctttggaagaaatcaaaccgttagtagtggactttctcaaagaaaggggattaaccctgtcggaagagaaaacaaagattacacacattgatgacggatttgactttcttgggtacaatatccgaaaatacaaaggagtacttctaattaaaccatccaaaaagagcctgaagaaattcatgcagaaaatccggggaatcattgattccaataaaggaagcaagcaggaatcacttataaggctcttgaatcctgtgataacaggctgggtaaactactataagaattgtgtggcttctgacacattcagaaaagctgactacctgatatttgaaaagttatggcaatgggccaagagacgacaccccaagaaaggcaaatattggattgccgaccgatacttcacacgggtaaaaaaccgtaactggtgcttcgtggcaaacttcaagaaaggcaagactgatgacaggattgcattgaaaaggctgtatgacacaaagattacccgatatgtcaaggtaaaaggtgaagcaaatccctttgaccccgaatggacagagtattttgaaaagcgcaagacttacaagatgctacagtcactcaacggtagaaaatcgttgctgtacatgtgggaaagacagaaccatttatgtcccgtatgtggtaaacccatagacaagaaacatccttggggaacttcccaacaaatagtcaacggcaagaaagtaaatttcctgctgcatgacagttgtagaagaaaagtcattcaaactaaaaagatgtaactatgagctggtttctattgaatagaaatttaacaccgcttgagccgtatgattggaaactttcacgtacggttctgaggggggaaaggggcagtaatgcccctgacctacccggcaa

SEQ ID NO: 596 - DNA, 4685720 bp, Bacteroides finegoldii (residues 1-1,561,907 of 4,685,720)
  source 1..4685720: mol_type = genomic DNA
agataaaatagatattaatgagttgtcctaacagtatcttaacaactctctgatttttcgattataatcgaaaatttgtcttatcaaatcactcattaaatctctccatttactcctaatccaaacagggcaaaatcgcccaagcaaggatcatctggaaatacttcggccaatgccaccgttatctgacgggcatttttcaaagaaaaagtttccgtatccgtcaacttgaaataatgtgctacccggcatacatgtgtatctaaaggaacaatcaaatctctgcgatcaaaactttcccaaatccccaaatcgacctccgaatcccgacgaatcatccaacgcaaaaacatattcagtttcttttgaggacttttggcagaaacttcaagaaatgcacataacttttccattggtattccgggatataacatcaaagcttcctccagactttcaaactgtgtataagctgtatataatcgccgaaagtatccataaaaatcagcatacgacaacatccgataaaagctattggtcgctcccgaaggaaaatccttctcccactggcgggacaatacatattgataaggtgaatctcccattaatctatgcagttcgtccgccttcttcaatatctgtttgcgattgccaaaactcataattgccgtcaacagaccactgacttcaatatcctgtttcaacgtatatcgatgagggaactgcaccggatcacttataataaagcctgcacgatgataaatctccgcacacatcaaaagtttattctttatatcttcagtcattttgagaaagtatcaagtattgaaagcacaaaagtacatattctagttggatttcttctttaagtaaatgacggattgtatccctaataaaataacaaacagatattctgccgtcatatacacagtcagagaagcatgaaaacattcacttaacagatacagataaatcaaatataccagaatagtgattaactggaagataaaagcgagcttcgtctttcctataccggtaacagcattaatataaacatatccgggcagtgcaaaagcataattcaacagcataactataaaaggatagaaagctaatctcaccagattatcgttattcgtataaaatccgacaatccattgattgctccaaagagctatccctatcaacggaagtcccaccacatagcccagcttaagaactttacgacaaacaggaaaaagttctttccccactcctgctccaatcaaattactgactaacgctcccgtagtggatgcaaaagaattgactatcacaaaaaagacggtagaaacactacgggtaatattggaaatagcaagctctgtctttcccagatgctcaatagcaacgaagaacagaaaccagggagcaacgctgataaaagagtgaagcatactccatacagatagcctcaacaactttattaacaatttcccatcataaacgaccttcagcccatatttcactttatcgaccctcacccacatatataataggagtacgacaaaagctccgaactctgccaaagaagaagccatcgccgccccggatatacccagattcagttcgaatatcagcagatagttaaaaggaatattgatacagatagccatgatagctgctgcggacaatgctttggtcgttgttatccctaccagaaaagaccggaaagctaaaaaaggaaatgagaacaacaaaccgaagctacgccaatccagataatgaatcactgcccggtaaatctcatccgaagttatcaaccggcgtaagataaatggagaaacaaacaaaatcagcaaacaaagaatgactgccatccccgacaggaaatataatccctgaaaaaatgtacgtcccgtctctttataatgttgttccccatttctccgggcaatcattacctgcagcccgatgctgaatccgaagcccagcatataaacagccaaataatagattccggcaagcgcagaagctcccagttcgacttctcccacatgccccaggaaaatagcgtcggtaatattgattaattgttccatcagaatgctcatcatcacaggaaagttgatgagccatatttgcttatatgtataattcattgctcaactttaaaatagcacgatacggtataccacatcatagcagcacacagttccgtaaatttataaaaatggatataaaactctttggcaggcgagtagttacctgtcggatagctgaatagccctgttagaaatgatgctattcgttgagcgtagctatatgcagagtttcataaatagatgaatactgttggtttatcaatcaattacgctacaaagataataaatcttactttatatcacaatgtggtacggtattagcagattacttatagtaaagagatgtattaaaaacattgattgcaacattaacagattgatttatacagatataccatattctaaagctaaggaatgattcttaaatatctttctcttttgaaaaaaggcatatcattttgaaaagagtagtaaccaataaataaccagataacaatgaaagtttgtaaattcgagaaaattaaagatgaggatgaaatgaagcaagtaatcaattgtattcagaaagaacatccttatgtagctgtagtccctatattggcacaattacaggagtggttacaggctatttccatcagttggtttcacgaagaagatgaagcttctcatgccacagtcaatgccatcgaagcatattgctatacccttgccaatcatctcattacagattcgcacctaaatcaagaaattaaaaaccggattctggagtgcataaagaaaatacatatacttgtagaagacaaagcagatttactgattgataaaatgataaaagcggaagtatacggattatccagcgatttattcacttattgcttacgtcaacaaggtcttcgtgcccaaacattagataccggcaaacttatacagatcaacctggaaagaaagccggatatcccatatattcaggaatctatccaacaatacattgacgagaaccggaatgtggatatttttatcgccccactttccatttgcagaaatgtgtatggtgaaatagacttcatgagcgaacaacgcaatgattactatgcaacagtgcttgccaccctattcaaagcggacgaaatactgttatccacccctatcaaccatatctacgcaaaccggaattgtctgcgagaacaacattcactaacttacatagaagccgaacaactgattaacagcggagtacacctgctctacgcagattgtatcacccttgcggcacgctctaatatagttatccgcctaaccgatacacacgatctgtcaacagaacgcctctatatatcttcccatgacacaggcaacagtgtcaaggccattctctcacaggattcggctacctttgtacgttttacctcattgaatgtattgcccggatatttgtttatgggtaagatattggaagttatcaacaaatatcaaatcaatgtcatctcaatggcctcatccaatgtatctatctcgatgatgctgacagccagccgggacaccctgcgaatcattgaaagagaactacacaaatatgccgaaatggttatggacgaaaatatgtctgtaatacatatcatcggctcccttcattggcaacgcacacaagtagaaagccatattatggatactatcaaagatattcccgtatctctcatttcttatggaggaagcgatcattgtttcactctatctgtgcacagcacagataaaaacaaactaatcagttcgctatccaaacaatttctcgaaagccagtgtgtggcctgatccaaagcaaaaacgctttccaacatatctttcgtgtccagaatatgtatccttatccggctttatatcttatattcctctatctttcgatacaacgtagtaagtccaattttcagcaaacgggcagtttccgttttatttcccttagtgtattccaaaacacgggcaatatgtcttcgttccattgccgccagttcaaagccctccgcactatcgtccgaacattcgtaatgagtattttgaatttccaaaggtaaatcgcaaatatccaaccgcccaccttcgcagacaatcaggctacgctcgataacatttcgcaattcgcggatatttcctttccaagactgtttctccaaagcctccagaaaagcgggagtcatctcactaatggaatacgaaagtttctcggaaaagctcttggcaaaagctgctgcaagaatactgatatcccctgcccgctcacgaagtgcagggagatgcacctgaaatacagaaagacgatagaacaaatcttcacgaaaacatccctctttgatttcttcctgcaggttgcggttcgttgcagcaatgatacgcacattcaccctggtaggctttgtgtcacctatttttatatactcgccggtttcaagaatacgcagtaacttggcttgcagttcaaaagccatttcccctatttcatccagaaaaatcgttccgttatgagcttcctcaaaaagccctttcttatctttcaaagcaccggtaaatgagcccgccttgtgcccgaacatctcactctctaataattccttactaaaagaggaacagttgaccgctacgaaattctgtttactccgcttactattataatggatagcctgagcaaaaacctcttttcctgtcccggtctctccggtaagtaataccggaacatccgtgacagacaccttctgtgccaaagagatagcctctttcagcactttcgattctcctaaaatagaatcgaacgaatacatctgcccgactttcttctccagtttttccaaccggacattcattcttgctttctccgcagcacgactaatcaaaggaatgatcttattattatcatctcccttcgttatataatcgaatgcaccattcttgatcgcctgcaccccgtcaggaatattgccatgtgcggtgagaagaatcacttccacattaggagcctgcttcttgatattcagcactaaatccaccccattcccatcaggaagaaaaacatcacacagaaccacatcgggcgattggacttcaagttgtttgacagcagctttacaatcgccagcctgacatacttcgtacccttcaagttccagcatacgtgccaaaaggctacgaatctggatttcatcgtcaacaataagaatcttactcatacaatttacttacatttaatggaagaataaaaaacagggtgtgcaaatataacttttttcgatgagtctatgaacatttcttatatatagttcgttatttccataggaaactatttacactataaaattatgaagattatcattatcggaggcgttgcaggaggagctaccactgctgcccgaatcagacgagtagacgagacagcagaaattatccttttggaaaaaggaaagcatatatcgtacgccaattgcgggctgccttattatataggaggagtgattgaagaacgggaaaaattatttgtacagactcccgaagcattctcgacacgcttccgtgttgatgtccgcacggaaaacgaagtgatttttattgaccggaagaaaaagacagtcaccgtacgtcagagtagcgaggatacgtatgaagagagctacgacaaactgctgatatcaaccggagcttctcccgtacggccgccattaccgggaatcgaccttccgggtattttcacgctaagaaatgtcacagatacagaccgtatcaaagaatatatcaacagccattctccccgaaaagcggtagtggtaggagccggatttatcggtctcgaaatggccgagaacctgcacgcacaaggggcgaaagtctcgattgtggaaatggggaatcaggtaatggctcctatcgacttttcgatggcttcgctcgtgcatcaacacctgatggacaaaggagtgaacctgtatttggaacaagccgtagcttctttcgaacgggaagggaaaggactgaaggttactttcaagaacggacagtcgatttctgccgatattgtcattctatctatcggagtacggccggaaaccagtctggcccgggctgccgagctaacgatcgggcctgccggcggtattgccgtgaacaactatttacagacatccgacgaagccatttatgctatcggtgacgctatcgaatatcgccatccaatcaccggaaagccctggctcaactaccttgcaggccctgccaaccgccaaggacgcatcgttgcagacaatatattgggagctaaaattccatacgaaggttccatcggcacttccatcgccaaagtctttgatatgacggtggcttccaccggcttgcccggcaaacggctacgcttggaaggtatcgattatatgtcgtctaccattcatcccgcttctcatgccggatactacccggacgctatgccgatgagtataaagattacgttcgacaaacaaacgggacggctgtacggaggacagattgtcggctatgacggagtggacaagcgaattgacgagcttgcgcttgtcatcaaacatcaaggtacggtatacgacctgatgaaagtagaacaggcatacgctcctccattctcctccgccaaagatcctgtagcaatagccggatatgtagcggaagatatgattacgggtaaaacgaatcctgtctactggagggagctgagagacatcgagatggagaataaattcttactggatgtccgtacacaggacgagtttgcattaggatcattaccgggagcggtcaatatcccgttggatgaactccgggaccggatgtcggaattgccgaaagaccgtatgatttatacgttctgcgccgtcggcctgcgcggttatctcgcttaccggatattgacgcaacacggatttgacaaagtacgtaacctttcaggcggattgaagacttaccgtgcagccacagcccccatcgttatacaccaggagaatgaagaccaaacagacgaatccccttcaccgcaagagaagacactttcgagcgaaccgtcagccgcaccggcaattcccgtagcagctgcaaaaacaatccgtgtggatgcgtgcgggctgcaatgtcccggtccaatactgaaaatgaaaaagacgatggacggactggcttccggcgagcgggtagagattacggctaccgatccgggattcccgcgtgatgctgccgcatggtgcagctcgaccggcaatcagctcatttccaaagaggcatccggaggaaaatctgttgttattatagaaaaaggagaaccaaaagcgtgcaatattgttacttcttgtgaggacaaaggaaaaacttttatcatgttcagtgatgatttagataaagctttagctacctttgtacttgccaacggtgcggcagccacaggacagaaagttacaatcttcttcactttctggggattgaacgttatcaagaaactgcataagccggaaaccgagaaagatatttttggaaaaatgtttggcatgatgttgccttccagctcgaagaaactgaaactttcaaagatgagcatgggaggaataggcggaaaaatgatgcggtatatcatgaataagaaaggtattgattctttggaatcactgcgccaacaagctctggagaacggggtggaatttattgcctgccagatgtcgatggatgtgatgggagtgaaacaagaagaacttctggacgaagtgactatcggcggtgtagcgacttatatggaacgggccgacaatgccaacgttaatctgtttatttaacggaacgaaataataaatatatgcaatgagaaatatgaaaacaatatgtgccatacgcgatgtattcagagctatgaccaattttgaggctagctttgagcaagtctaccagataacgctgaacgaggccatgattttgtgcgctctcaagtgctcttcggaaagaatgacggcaacaaacctgtcgaaacaaacagatttgagcccttcccatacatcaaaaatgctccggatactggaagaaaaaggactgatcgtcagaactttgggaagcgaggaccggcggcaaatgtactttaccctgtctgctgcaggaagagaacgggtttgtgacatggaaatacagaaggtggaaatccccgaattactgaaacctctgttcaaagacgcagaatcttaaacggttctctgcaaaactataaagagagttcaaaacgcggattaacatgaattaatccgcgttttattattcattatgacacactctcttctttattacagacacagaaagaaaaatgttaattttccggcaaaataattcttcgtgcgaacctttttatttctttgttgttgtttgtaacaaaagccccaaggtaccagggcctgatttttatataacctaaacattataaagatatgaagaaattaattcctattttattggcggtctttgcactcgcatcctgcgaaaaagacccggacatgggtaagctggataacaactatctggtatacactaactacgacaagaaagctgacttcaaagttcctacattctatctggcagatcaaattctggtaatcaacgacagtaaagaaccggaatatctcgaaggagaaggcgctgaacaaattctggctgcttacacggaaaacatggaagccagaggctatacagccgctgataccaaagaaaatgctgatcttggtatccaagtaagctacatcgaaagtacttattatttcaccagctacaatcagcccgaatggtggtggggctatcccggctattggggacccggttactggggcggaaactggggtggcggatggtactatccgtacgctgtgacttacagttatagcaccaactcattcctgacggaaatggtggacttgaacgccgaccaaggtgaaaaagccaaactccctgttgtatggaccagttatctgaccggatttgaaacaggttcgagcgctgtcaaccgtactcttgcagtggaagctgtcaatcagtcattcactcagtcaccttatcttactaacaaataaacaactacaactgttatgaaaacaagaaaaaatatatacttcaaggtagtagccttggcggctattgccatcgccttcgccatgccggctaaggcacagctatcagacaacggatatgctaatatcgactggcagtttaatgttcccctcggcaatcattttgccgacaagtccagtggttggggtatgaactttgaaggtggttatttcgtgactcctaatatcggtttaggtcttttcctaaactaccatacgaaccacgaatatgtaggccgtgaaaccttccaactgggagccggtgaggtaactaccgaccagcaacacaccatgttccaattgcctttcggtgctgctgcccgttaccaatggaatcgcggtggatccgtacaaccatacgtcagcgctaaactaggtgccgagtatgctaaaatccgttccaacttcaatatgctcgaagcaagagaaaacagttggggcttctacgcttctcctgaaatcggtatcaacgtatttccttgggtatacggaccggggctacacttcgctctctactacagctatggtaccaacaaggctgatgtactgcattacagtgtagacggactgaacaacttcggtttccgactgggtgtatcattctaaggctaaactctatcagaattacgttaataaaaagaatgcctctctgcttccacgagcagaggggcattccattttatagcttgccggaaaaggagggattactttttcttcatcgcatcataaatcgcttcctgtatcctttcacgaatgtgcaattgattcaatttacggttggtcacgtccggataaacccggttactcaaaaagacatagaccaactcattcacagggtccacccaagcacaggtcccggtaaacccagtatgaccatacacttcggcaggcacaccgggagcacagttccctttcttcgaatcagtcatatccggtttatcgaatcccaaaccgcgtcggcttatctttgaaacttctgtagtaaacagttgacaggtttccttactcagataacgctgcccgtccaactcccctctattcaataacatctgatagatacgggcaacctcacgggctgtggaaaaaagtccggcattcccgcccaatccaccaaagaaagcagaagcctcatcatgaacaaagccttgcaaagtctcttttcgcaagaaacgatctttattggaaggcacaatctccgatttggcaaagcggcgtaaaggcaaataacccgtgcgctccaaccccatcggtccgtaaaattcacgttgcagataggcttccatcggcatttccgccaactgttccaccagcattcccaacagaataaatccgatgtcactatatacatagcgtttctgtctcaatggagtttccgcaattttctcttctatcactttcctgaatgaacggttcagccatatactatcacagatttgaacggtataatccccggtcccgacagacgagatatattcttttttaaacttaaaatccggattcgcccatgtagtcgtaccaatccgtaacagatgtttcgcatccctacgcgcactgaataatcgtccgtcgtaactatccttgtctatcacttcctgatagaacggtatccaagatggcaaaccggactggtgaagcaggatttcctgaatagtgatatctttcttgtctgtacgttgcaggaacggtaaataatccgaaatcttatcggtaaggctgaaacgtcctttatcgtaaagtttcataatagccagcagagttcccgtagttttggataaagaggccaaatcgtaaatatccgtagattcaacacgaggactgccctttcccgcatacgtaccgaacgctttatcatacatgatatgcccgtttctcaaaacaactatctggcaaccgggataggctccctgctgaatgccgtccagtgcaatggcgtcaatctttttcagaagaacggacgaaagaccatgctcctccgggatgaaatgtaaaggcgttctcggtgtaatggtcactcccgcccctgtgggaaacagtccgcctatacttgccgacaaccttccgtccgccgtggctttggcatataagatatcagccacctgccgctgcacgtcaccattatggctatgccccaatatcacggctgatgcgcgggacaccgcacgttgaatctgcaacatcattttgccgggtgtaaagaacagatagatagccgggcttttaggaacaaacttggcaaagaaagactgataagcccccaatcgttgttcactgaccgctactacaatccgtttataagcagccaacgaatcacgcaacttctgattttcctgttcagtctgattggcacgaagacggaaacggaccaatgaagtataacgggacatctgactcgccagcgcattcgtctcacccggttttccaacttcgagcaatgcaatcttctgttccttgtccgcgtgcaacggtaaaatatggttcttattgttcagcacagtaatcgccgcccaattcaaccgacggattaaatcacgtgtctgaggagtgttaatacgctgttccaaaccggatacttgcacaaacggctttttctttaatcccagtgcatatttataagtcagcaccttacggcatttactctcaatatcctcccggctcaactcccctttttcaatggcttccaatacggcggatatctccgctttcagattacggggagccagcaccatatcatttcccgctttcaatgcttgcaaactgacacttccattccccgacacccctttcatggcaagcgcatctgtaaatatcagccctctaaaagccaattcgtccgtcagcaaatcatacaccacattgcgagacaatgacgatgggagtccgcccaccggttctatgatgggcacttgcaaatggccgaccatcataccgcccaatcctgcccggatcgctcttttaaaaggataaagttctacactgtccaaccgctcgcgagtgaaaggaagcacaggcaacgccttatgtgaatcaatatccgtatctccatgaccgggaaaatgcttgcatacagacagtactcctccttcttccaggccggatgcgtaagcgataaccttatctgccacctgtatcggattttctccgaaagaacgggtattaatcaccggattcttcggattgatattcacatccgccaccggagcaaaattaacctgagccccaatctgtttgcactggcgggctacttcacgcccatacgcatgaatcaaccgattgtcctgaatacagcccagcaccatatttctcgggaaaacaggtgtgccgcgcaaacgcattgccagcccccattctccatcgaaagtaatcataacaggtactttggcttgccgttgcgcccgattcgtcaagttgacctggttctgcagttttccaccggaaaaaagaagtccccccactttataagtatcaacggcttcacgcagcaattccagatttcgtttggtatccacaggagcgatggtatagataaataactgcccgactttttctttgaaggaaagcctatccattaccgagtctacccaatggcggcagtccttatcctgaagagccttatataccaactgcggttcaacggcagcagcattttgagccgaacccgttaccggtccggctgaaataagaaataaaaacgctaagattgaggaaagtttcttcatttatgttccaaagtcaaatcaagacgacctacacgcacaccactcttccccgtgtgcatgacagccacttcttctccatccatgttcaaatatgttttcgggcctttcataaaggtgtgcgaatgcccgcccaaaatcacatcgatattacgtgtattcgccaccaggcgttcgtccatctgaattcccaaatgcgacagacataccacaacatcacatcctttttctttcagcaaagcagccacttcattcgataccccgaccgggtcctcataaactattccttcacatttattagcctgaatcagtccttccggttccgctcccagaccgaagacacctattttcaaaccatatttctctaaaataacgtatggctttacaatatctttcaataccgtagcttccaaattataattggcacagactaccggaaactttgccatcttgaaaatacgggccatgttatccacatcgaaatcaaactcatgattgccgatagtcatcgcgtcatagcccatttcgttcatcaacttaatttccacttccccctgaaacatattataatagggagtcccctgcgaaatatccccgcaatcgaacaacaatacattgtcgtgctctttgcggaactgttcaaggaaagtagcccggcggacaaatcctccttcattataattgcggtcacctttctgattgaccggttcaatacgactatgcacatcgctagtctgcaaaagtataagttctttagtatcctgcgcaaatagggaaaaggcaaagcttactaccaagcacagcagaaatgatatctgaattcttctcatatccaacatttttaggttctccttttttattttatagaaatacgtccatccagtctggaggtaatcagcttaccttcggcagtctgcttccgcacatattcaagaaacaggccgcgcaaagtagcgttctccggacatacacgtttctccgcttgcagaagagcgtccatccgcccgtttccatccgccagataatcgatggtagctaccgtataagattggtcatccttcaccggttgtccgccaatggttacattcagcagttcgccttccttactgatttccatacgaatgccgctcactccttctccatgcaaggaagcgatagccttaaaaagacgtttcatgtccgtccccttcattgtcaacacacaaagcgaattctcgaaaggaaggatttcgaagatttcgccaacggtgatatctcccttcggcaggatattgcgcaatcctcccatatttaccaatcccatatcggcaggtttacccaatacacaaaccgccgcctgctgcaacacacctgccacaagattggaaaggaggctttccggattccctttatccattatcatttcactggtgccaatgacttcatacatcatcgcatctactttgtccttatagggcttcaatatctcagcagctcttttgtcgggattcgcatcccagaccgaatcgatcgtaatcatactgccttttactccaaccacttcgtagttagccgtggtttcccgtgccgagcgacaggacgtaaagaggaaacctcccgccaacacggctacaatcagatactttacataagtctgtttcatgttcgctatttttagatatgctacaaatatacgaaaacatttggctatctgacaaataattcgttactttgcaccgctttcgcgcaatcgctgtcaagagaagagatacttggtatgttgcgttgtaacgatgaaacaatttaataataacaacaatggatttaattaaaattgcagaagaagcatttgctaccggaaaacagcacccgagcttcaaagcaggagacactgtaacagtagcatatcgtattatcgaaggtaacaaagaacgtgtacagttgtaccgtggtgttgttatcaaaatcgccggtcacggagacaagaaacgttttactgtacgtaaaatgtcaggaactataggcgtagaaagaattttcccaatcgaatcaccggctatcgatagcatcgaagtgaacaaggtaggtaaagttcgtcgcgctaaattgtactacctgcgtgctcttaccggtaagaaagctagaatcaaagaaaaaagagctaactaatcctagttacttttcgattcgaaataaaaaagggaacttcctgcaatggaagtttccttttttattgtcattcctccctctgatcttccactctgaaacataaagccccgagagtcataaactcccgaggcttcattacctttactacaataatgatatattattctttcagatccttcaattcccaagccaatgcactggcacccagtacggcggcatcagaatccttcagttcggaaacgagcaatttcgtcttacctttatagatattcaggatattcctatcgattgattcctgaatcggtttcatgatatagtcaccggacttagccaaaccgccgaacaatacaattgcttcgggactggagaatgcgatagcgtccgccaaagcttcacccaaaatatttccggtaaattcgaagatttcctgtgccagtttatcgccttgaacggctgcgtcatatacatcctttgaagtaatgttttctgcaggaatattacggagcagacttgcatccgtgcgggcagccaaaaattcgcgagcagtacgggctacaccggtagccgaacaataagtttccagacaacctttacggccacaaccacaaagacgaccatcgcgacgagcgataacatgtcccaactcaccggcaaaaccatcatgaccatacaccatctgaccgttgataacgataccgctacctacacctgtacctagtgtaatcatgataaagtctttcatgccacgggcggcgccgtatgtcatttcaccgatagcggcagcattagcatcgtttgtcagggctgtaggaatgcccagtctttcttcaaacatagcagccaacggaagaatacctttccaaggcaaattcggagcgaactcgatagttcccgtatagtagttaccattcggagcacccacaccgatacctctgattttatccacaccgccattggcgataatcaatggaagaagatttttgcacacttcatctgcatattcttctaccgtaggataaccggatgttttgatagaactgcttgctataatagttccgcgtgcgtctacaattccaaagacggtatttgttccgcctatgtcaatacctactacgtagggtttctccatgtttgaattcatgatacttttatttaaaagggttagttaatcattaagtttactgcacacaaattacgtaaagaagattgagtctacaaaatgtttttcaaaaaaagttcaacctctttgcaacttttcttatctcgctaccgtctaatagaagaaattcataagaaaactgaaacaaaataaaggaaactgtgatacaactgacaaatatcaataagacctataataacggagcacctcttcatgtgctcaagggtatcgacctccacatcgggcaaggtgaatttgtttccatcatgggagcgtcagggtcaggaaaatcgactttacttaacatattaggtattcttgataattacgataccggagattattatctgaataacgtactcatcaaaaatctaagcgaaaccaaagcctccgaataccggaaccgcatgatcggatttatcttccaatcattcaatctgatatcgttcaaagacgcagtagagaatgtagcacttcctttattctatcaaggagtaagccgtaaaaagcgcaatgcccttgctttggaatacctcgaccgtctgggattgaaggattgggcgcatcatatgccgaacgagatgagcggcggacagaaacagcgtgtagccatcgcccgcgcactcatcacccgaccgcagattattctggcggacgagcccacaggagcattggacagtaagacctccgtagaagtgatgcaaatactgaaagacctgcaccggacggggatgaccatcgtagtcgtcacacacgaaagcggagttgccaaccagaccgacaagataatacacattaaggacggtatcattgaacgaatcgaagacaacattgcccatgacgcttctcctttcggtaaaaacggattcatgaaataaaaaccaatcagacatgatagacatctggcaagaaatatacagcaccattaagcgcaacaagctaaggactttcctcacagggttcgctgtggcatggggaatattcatgcttatcgtcctcttaggggccggcaacggactgattcatgctttcgaagagtcttcttcggaacgtgcactgaacagtattaaaatctatccgggatggacttccaagtcttacgacggactcaaagagggacggaaaattcaactggacaacaaggacttacggatcaccgacactcattttccggattatgtaattaaggccggagcttctatctggcaaggtaccgtcaccatcagtttcggctcggaatatgccagtgtcgggttggcaggcgtctttcccaatcatatagaaatagaaaccataaagctctttaaaggacgttttattaatgagacggatattaaagaaagacggaaagtaatcgtcctgcataaaaaaacggctgagattctttttcataagacgcataccgaacctatcgggcagtttgtcaatatgggaaacgttgcctatcgggtagtgggactttgcaacgacaaaggagatagcggtgagaaacctgccctcatacctttctctaccttgcaaacgatctataatcaaggagacaagctgagctgtctgaccattgctacgaagaatctggagacgattgaagcgaataataattttgaaaaagagtatcggaaagctttgggagccaaccaccgtttcgatcctaccgacaacagcgccttatggatatggaatcagttcaccaattatctgcaacaacaaaaaggtatggccattctacgtaccggaatttgggtgatcggcattttcactcttttaagcggcattgtaggagtatccaatatcatgctgatcaccgttaaagaacgtacacgcgaattcggtatccgcaaagcgttgggagccagaccgggctcgatcctttggctgattattgtagaaagtgtaatcatcactactttattcggctacataggtatggtggcgggcatcggagtgaccgaatggatgaatgccgctttcggcaatcaagtcatggataccggcggatggacaacaaccgtcttcctgaatccgaccgtcgatataaaaatagctattcaagctacacttacattaataatcgccggaacgttagccggattgttccctgcccgcaaggctgtcagcatccgtccgattgaagcacttagagcagattaagattatgaaaatagacatggacacctgtgaggaaatcctcattaccatcacaagaaataaaacaagaagcctgctgaccgcattcggcgtgttctggggaatcttcatgctcgtagcccttatcggaggcggacaaggattggaagagatgatgaagaaaaactttgaaggatttgccaccaactccggtttccttgccgcgcaaagaacgggcgaggcttacaaaggtttccgcaaaggaagatggtgggatctggaagcaacagatatcaaccgcctccggtcacaagtcaaagaagcggaagtgattactccttccgcagcccgctggggctccaaagccgtatacgaagataaaaaatacgattgcagtgtgaaaggactgtatccggactatctccatatcgaatcacaggagatagcatacggcaggtttatcaatgatgtagatataaaggaagcacgcaaagtgtgcgttatcgggaaaagaatctacgagagtcttttcaagccggacgaagatccgtgtggcaaatacatacgtgtggatgggatctattaccaagtcatcggaatgtctgcttccgaaggaaacatgagcatacaaggacggtcttcggaggcggtcatccttccttttactaccatgcaacagacttacaatctgggagggcagattgacgtgatctgtttcaccgtgaaacatggagtcaaggtatccgacatacacccccgaatggaacagatcattaaagctgcgcattatatcgctcccaacgacaaacaggcacttatgtatctgaatgccgaagcgatgttttctatgatcgataacttgtttaccggtatccatatactcatctggatggtaggattgggaactttgttggcgggtgctatcggcgtgtccaatatcatgatggtcaccgtaaaagagcgtaccactgaaatcggtatccgccgggcaatcggagcacgtccgaaagatatcctgcaacagattctgtctgaaagcatagtgctgaccgcccttgcaggaatgtgcggaatctcctttgccgtcatagtgctgcaactaacagaaatggcagctaactcaaatggaggtgatatccgtttccaagttaccttcggactggcagtcggaacgtgtatcttactgattgcgttgggtatgctagccggactggcacccgcttaccgagctatggctattaaaccgattgaagcgatccgggaggagtagaagttgagaatggagagttgagagttgagaattagaaattaaacatatatatccaagatgaaaaaatatctgaaaatcacattattggtagtcattgctatcattcttgtcggaacattcgtattcctttatcagaagtctaaacccaaggtaatcacttacgaaacagttagaccggaagtgactgacctccaaaaaacaacagtagctaccggaaaggtggaaccgagagacgaaatcttaatcaagccgcagatttcgggtattatcgacgaagtgtacaaagaagccggacaagctgtgaagaaaggggaagttatcgccaaagtaaaagtaatccctgaactcggacaactgaattctgcggaaagtcgtgtgcgcctggcagagattaatgcaacacaggcagaaacggattttgcccgcgtaaagaagttgtacgaagatcagctgattagccgggaagaatatgagaaaagtgaagtagctttgaagcaggctcgcgaagaaagacagacggctaaagataatctggaaatcgtaaaagaagggattaccaaaaacagtgcctctttcagcagtaccctgattcgttccactatcgacgggctgattctggatatacctgtcaaggctggaaactccgttatcatgagcaacactttcaacgacggaaccactatcgccacagtagccaacatgaatgacttgatttttcgcggcaatattgatgaaacggaagtcggacgtatccatgaacagatgccgatcaaactgacaatcggagctttgcagaatctgactttcaacgccattctggaatatatctctccgaaaggggtagaaaccaatggtgccaaccaatttgaaatcaaggctgcaattaccattccggattccgtactgatccgttccggatattcggctaatgcggaaatcgtattacaaagagccaatcaggtattggcagtacccgaaagcactgttgaatttagtggtgactctacatttgtgtacatcatgacagattcagtgcccgaacaaaagttccagcgtacacaggtgactgccggtatgagtgatgggatcaagatagaaatcaagaaaggggtaaccattcaggacaaaatacgtggtgcagagaaaaaagataaataattgaatccgatgaaaataattcgtaaaaccatatcagcctttctgcttgccggagtcggaatcatctccatccaggcacagaacaacccttcgcaagcgtggacgctgcggcaatgtatcgactatgccattgagcataatatagaaatccgtcaatcggccaataatgtcgaagcaggcaaagtgagcgtaaacaccactaaatgggcacgccttccgaatttgagtggtagtgccagtcaaaactggagttgggggcgtaccgcttctccgatagacaactcgtatagtgacatcaacagcgccaataccagtttcagcttgggaacaaacgtacctatatttaccggtttgcaattgcccaaccaatattcacttgccaaactggatttaaaagctgctatagaagatttgaataaagccaaagaagacattgcaatcaatgtcacttccgcttatttgcaggttttattcaaccaagaattaagtaaggttgctcataatcaggtagatttaagcaaagaccagttaaagcgcatccaagggctccacggagtgggtaaggcgtcctcttctgaagtggccgaagcacaagcccgtgttgcacaggatgaaatgactgctgtacaatcagacaatacatacaagttgtcattattagacctcacccaacttttggaattacctacgcctgaaggattcgtgctcgaaagtcctaaggaagaactagagttcgaatctctcactccaccggatgatatatatacacaggctattgcttacaaaccaagtattaaggctgcagaataccgtttacaaggtagccttaacagcattcgtattgctcaaagtgcattctatccacaattatctttcagcgccggtttgggtagtaattattatacggtgagcggaagatcagaaaacagcttcggcagccagataaagaacaacttgaataagtatgtaggattcaatttgagcgttccgatctttaatcgtttttctacacgaaaccgggtacgcaccgctcgtttacaacaaatagacttatctttgagattggataacgcaaagaaagtactctacaaagagattcagcaggcttggtataatgctctagctgctgaaagcaagtacaactccagtgaagtggcagtgaaagctaacgaggagtctttccgcttgatgagtgagaaattcaataacggcaaagctacctttgtagaatataatgaagccaaacttaatctgacgaaagctctttcggataagttgcaagcaaaatacgactatctgttccggactaaaattctggatttctacaaaggacaagtcattgaataaaaagaaatatatttgagtttagtatagtagttccttaaaacatatccgttggttcattcgttattatagaaagaactaacggatatgaagtgttttatcatcatagtgatcgtagtgattagtaatacatttttaggagttgctaaaccaatgaaaaatcaagcagaaatctattttgcaggaggatgcttctggggaacagaacatttcctgaaacaaattcgaggagtagaaagtactcaagtaggatatgccaacagtaatgttgccaatccgagttatgaacaggtctgttcaggaaaaaccaatgctgcggaaacggtaaaggtggtttatgatcctaaaacggtagatttaaatttgctgctcgatctgtatttcaagacaattgaccctaccagcctcaaccgtcagggtaatgaccggggaacacagtatagaaccggaatttattatgtagataaagaagatcttcctgtcattaaccaggctattaaactattgtctgcacaatataagactcctatcgctatagaagtaaagccattgactaatttctatccggcagagacttaccatcaggactatctggataaaaatccgggaggatattgccatatcaatcccgctttatttgaaatggcacgcaaagccaatgcaccgaaaacaaaagtgtatcaaaaaccggatgactcaaccctccgcaaggaactgtcggcggaacaatatgcagtaacccagaagaatgccaccgaaccggccttccacaatgaatactggaatgagcatcgcccaggcatttatgttgatattaccaccggagagcctttgtttgtttctaccgacaagttcgattcgggttgcgggtggccaagtttttcccaaccgattcaaaaagatctaatcacagagaagaaagatacttcgcatggcatgatacgtacagaagtgcgcagtagaaccggagatgcccatttgggacacgtatttacagatggtccgaaagagaaaggcggattacgttattgcatcaatagcgcctcccttcgttttatcccgaaagagaaaatgcaagaggaaggttatggagaatatttgccgctcgttaaatagatattgaagagttacaaaagctaatcgtaattgttcattagaaaaacagaatggtgtacgaaaacgaacgaggttgtgtcaaaatgctgacacaacctcatccaagttacgggcgttgcccggaatagtctagccggtgaaaacccggagtctagttctccttccgctgaggagtaatgagattgatataaataataaaggaataggttatcttcttgaaccgctgctgtttctttcagaggaacgggaagagctttgagtgctattgcttctcgcacttccggaagaagagcgtctttctgtttgtccactagagacattgctccgggtagatctactgcgaccagaatcactgcgactggagctactacgactggaactaccgcgcctggaactggaagagctgttatttctctcagaactgttatttctattataggaactactatcgtttcgtttacttgaacttcctctcgaactactacttgtttttccactttcacgattggaggaactgaagccagttgaacttccgcttgttggtctgcgattagagcttgaagaaccgggacctgtttccggacggtaagaattacccggacgagtcggtgcattatgcggacgtaccgaagaattcggacgaatccgaaccgagccaaaatccgaacggcggtaagagtgatacactctttgatctcttacccgatgaggcgtagaataatggtgaaaattattgtatctaccccgataatagctggtatgatgaatatgcggacgatagtgcgctccacaataggtatgataatgataaggcacaccgaaatagaacaagccgcgattcggataattgatataaacccgtaaactccatcttcctccggtcacataaatcggccgataaaaataatcggctcccatgaaccggcgatattgtccatcactcaatacccaacgaagatcgtcattacggatgtccaacgcttcataatagtcatccatcgcccattcataaccacgtgccacgtaatccatgatattacggaccgaataaataaagtcgtaattaatctcatacgcatcattatattgttgagtggtcagattcagttcatacgccatcttatctgtaagaaaacgtgtttccttacgtatcttgctagtactcattcctgccatcacagtcataccggcacccaaaccgatagcaaaaagtaaaaataatatccgcttcataattcaacctcctatcatttattatttcaatcccccccacacacttaatcatttatcactatcgacgtctgccgtagctttgcacaaacttattcatctcatccctgttagacgaaaatgtcagcgtagcaatgactgtaaagaaagcccctttatcaacgatacgcggatacatcatcttcataatctccatccggtcatcatcaaaagtataaagtcgcgtcaattcaagacattgcccggaagtaaaatccgaaccggccaacgccgtcttaatcatctccatgcggtcatccttaaaaggttctttcttcacctcactgagaaacctcttaaaaagttgctcactcatcactctatcatattgactatccggacaatatccctcttgtccggggcggccaggactaccaggacgaatctctccacgtccatccacgtaaatctctttcacactattcccatcaaaataaatacgttcattatataaccgcctccctttccatgctctctctcccggacgggcagagcgcgtagcatacacttcaacggtgtaatatcctgatttcaagttagcgacaaaacatgttgtagtcggcagacacatctggtttcctccaaaatacacaagaatcggggtatctccgccatcaatacgaattccacttacagtctgcgcctttaaagagagagcagcgagtaggatacagaaacttattacaatcttacgcatacttatccagtttttattattaatatctctaatctgatagtacaaaaatagggtgagaaaactccccaccccaatgattccctctattcgtgcatagggatttccctattctatttaggattccaccaaagcaatgccatcctcatgcaaggtaatcagacgtttcttatacaaatcgcctactcctttcttaaaggttttcttactcacaccgaacgtatcataaatatcttccgcaggactcttgtcgttcagatgaatccgtcctccctgctctttgatataatcaagtaatgtcttcgcaaaatcatcgaccttttcaaagcccggtttctgaagaatcaaatccacctttccatcctcacgcacctgtttcacaaaagccttcatctccattccggtctctatcgaactgaatatttcattctcatacagtaagccgctatacatatcatctataattgccttaaagcccaagtctgttttctgccagataagaatattcacctctgctcccggagcatattccggcttttctttcgacagataacgttccacttttgccgaagccacaatacggtaactctcttcatccacatgtgcatgaaccacgtatttccgtccaacctgcattttcatcttctgctcacggaacggcacaaacaggtctttcatcaatccccagttcaggaaagctccgtattgatttacccaggagacttccagacaagcaaactgtccgacctgcactaacggggttagtgtcgtagcaatcagcctctcatccatatccaggtaaagaaacacattcaaaaaatctcctatcttacaatcctcgggcacatagcgggtaggcaacaaaatctcaccttcttccccaccatcgagatatacgccgaaatcgacttccttcacgacttcaagctggttgaactttcctaattcgatgctcatattcttatctattatattatataagatacaaagataatctattttgaatagatccctcaatcagtcagctataacttttcgttatcgagaaaaactatttataatgaacaatcagccttctaatatgttaactttgtagcgacaaaaagaaagagtaaattattcacctttttaaacatataaaattatggaatttctaaccaacgagaaacttacgattgtgggagctgccggaatgatcggctccaacatggcacaaacagccatgatgatgaaactcactccgaatatttgtctctatgatccattcgcaccagctttggaaggagtagctgaagaactgtatcattgcggttttgaaggtgtcaaccttacctatacttccgatatcaaggaagcactgaccggagcttcttatattgtttcttccggtggagcagcccgtaaggcaggtatgacccgcgaagatctgttgaaaggaaatgcagagattgccgctcaattcggaaaagacgttcgtcaatattgcccgaacgtaaaacatatcgttgtcatctttaatcctgcagacatcaccggcttgattactttgttgtattcaggtttgaaaccttcacaggtttctacattggctgcgttggatagcacccgcctgcaaaacgaactggtgaaattcttccatatccccgcttccgacattcagaattgtcgtacgtatggcggtcatggagaacaaatggctgtatttgcatctaccaccaaaataaaaggagaacccctgaccgatttcatcggtactacccgccttccgttgacggaatgggaagcactgaaagtacgtgtcatccagggtggaaaacatatcatcgatctgcgcggccgttcttctttccaaagcccggcttatctgtctatcgaaatgattgctgctgctatgggcggacagccattccgctggcctgccggaacgtatgtttccaatggcaaattcgaccatatcatgatggcgatggaaacttcaattactaaagacggcgttacttataaagaagtagccggaactcctgccgaacaggaagaattagaaaagagctacgaacacttatgtaaacttcgtgacgaagtgattgaaatgggaaccatcccagccattaaggattggcatgcattgaatcccaatattgactaatcaaacaatattagcgaaagcagaaggccgaaacctgacaatctttttatcgttgggatattcagtaaatgttcctctttctaaaaaatcaagagaaaagctcacgtaaagcaaagcttttctcttgattttttcgttcaactctcccagtcttctatcttttttgtagaatattatttacatattcttgttttttccttcccatccatgcattatgtacatgtcttttttaggggaagttaaaacctctcctgtttttcctgttattttaatcagattatgctgcctttctttttttcttttcgaccttttctatcatacataccgcattggctgtatgtattccaaagaaaatccaaagtacttccgttttcctgtttctagcttttatcctggccagtgagtaatgttgtttctgcgttccaaaacttccttccaggcgggtagctctttcacggctgagttctgaccgtaagattctccgaagcggctcatctttggcagctctgcccttacgcttaaaggaagtgcttatatgatatttagtacaaaatttccggttggcattattggcatagattgaatccgccgcaagcgccttaaccctaaccccggtcagttgttgttgcagatgaatacagtctttcaaacgtactccttcgttaaaagccttaaaggagatatgttctataaaggagattccgtctatctgtatattgttgactttggctccgaattcaacggatttggtttccttgcctctgataatggggcgaaggtaatgccggtcgatactcacgatacggttggacacttttttgcctgcaaataaattcttcccttgctcaaggactgtctgtatgaccgagaaacgtctttggtaatcagaggatagtgcaagcctgttcctgtaggatgaatgaagctgctccagctggtcaagtaacttttccaataattgaagtaaccttcgtgtaatcatacgagtctgtgatttcctgcgtttacgcagtttgctataagcaagataggcacggcgtacatcaagatacttgttacggggacgttgtatgtgcaatgtacggcaatgtttgcacagatgacgatgaagccatacaataccttcccataagagtttggcatcagtaggaaaacgcagatgactttcataacaggtggcatcggtcatacagacatgaaggttctcaagataaggtttccaatgctcggcaagaatgagctggagggactcaacgtcaaggcgattcgctagttcctgacgaattgcactgacgattttaggattggttagtggatgaagcggatcaatctgaacaccacaaaacaactggtaatgaatattaccgtttaaatgctcaatcagttgtgcatcggaaaagttggtataggacttcaagaccatcaaggctattttaccttcgggagaaaaataacttttacgacccaaagcagaggacttcaaatgcatttgtcgggccagttccgagaaagggaatagagaatggagtcgacctaattcactcgttgcaaaactttgacgatattttttaagcatatcgaactcggtaaaacctaaacaaggttcgatttctgagattttttgtatctttaccatgtgtttttattttagattacccccgttttggccgtcaaaccgttttttggggggaatgcttaaagatacaaaaaaggcaactaattcgcaatgaagtagttgccttaaattttattattttaggaatatccctatcgttccggttttcggccttttttatttcattgccaatgtcattcccacggaagaacattcctgacaaatccctttaaggacataattaatgctatgcaaagtaaatccttcaggcaaatcaatcaccgggatatgggtgccttccaggcagaatgtccgctgacatttctcacaataaaaatgcgaatgtaaatcctgtaccacacaattgcaggagttgtcgcaaacggcatacttcaacgagccgcttccatcgtctatgctatgtatgaggtgatgagacaagaagagagcaatagtacgggatatggtcgatttatcgactgtgtcgagcaatgtttcgaggtcaagcaatgacactgcacgctctgcctgcatcatctcttttatcaccaagagccttattgcagttggcttaatgtctcttctgaccagcttatccaaataaatatcttcttccatctttctcctattttatcattttctgtattctgacggcgttcataatagcaagcaacgcaacgcctacgtctgcgaagacagcttcccaaagagtagcgattccaccggctcccaaaatcaacacaagcaatttcactccaaatgccagtgatacattctgccaaatgattcttcgtgtcagctttccaactttgatagcttcggctactttcgacggctgatctgtctgtatcacgacatcggctgtttcaatggctgcatcactgcccaatcctcccatagcaataccgacatgactcaaagcaagcaccggtgcgtcattcattccatcgccgacaaatgcaatccggtttgcctcatcctgacgcaattcttccaggtgtttcactttcccttccggaagcaagtcgccataggctttcgatatgccgagcttctccgcaaagttagtaacaatactctgtttatcaccggacaatatctgtatgttttcaatatttaaagcttttaagcgatcaatagctacctttgcgtcttctttcaaggcatcagctaacaacagataaccggcataacggtttccaacagcacagactacaatggtatctgtcatcttcaacaattcttgcggaaaggatatatcaaacttggacagtaaccggcaattaccaaccagaaccggtattccgtctaccgttgcttccaatccaaagccggcatattctttcgtatcggcaacggttacgcgttcaatatttcgttctttcgcataattcacaacagccttggcaatcggatgtgtgctatcactttctaccgaagcaatcagtttcactaattcttcttccgaaatatcgcctgcacttttacaggcctgcacgtcaaaggttccttttgtcagggttcctgttttatcgaataccaccgtattgatcttagtgatagcatccagataattaccgcccttgaataaaatacccaatcgggatgccgctccgataccaccaaaatagcctaatggaatactaaccaccaatgcgcatggacatgaaatcaccaaaaagaccaaagctctgtataaccaatcattaaatgtgaatacaaatgcaggattgataagtgaatagacaaatggagacaatacaattaatacggccagtatgataacaatcggtgtgtaaacacgggcaaacttgcgaataaacaattctgccggagctttgcgttcggcggcattctgaacaagttccaatattcgggcgagtgcgctcttatcaaaaggtctcgtcacttcaagtcggattaccttgtcagttacaatcattccggcaagcacttcctcccctttccgaatattacgaggcacgctttcgcccgttaatgcagctgtattaaaagcggcaacctcattctgcatggttccatcgagtggcactcgctcacctgcctttatttctatgacttcaccgacttttatctttttaggactttcagtaacaagattaccctctctaagtaccagtgctttttcgggtcttacgtctaataaggctcctatattacgtttggctttatctaccgctttatcctgaaacagttctcctaccgtataaaatagcatcacggctacgccttccggatattcgccaatatagaaagcccccagagtagcaataatcattaaagtaaactcactgaaatagtctttttccctgatgctttcccaggcttctttcatcaccggaattcctaccggaagataggctacgatataccatatcaaagaaacatatccttcacggaagaatgctaaatcaagagcattcatgattattccacctgccagcagcaggagagagaatatcactttcccatattcatggaataccgaaacctttgcatcaacctttttttctgttgcgcatgagtgagcgccacaactacaatgtcccataacattcatcatttagttgatgcaaaggtagcaaatgatttatgcaacaaagttgcaaaatcggttttagcacctttcaatgtcagcaatatcgcaacagccatttccaaaccggcacgacttctatatccaactcattccctgaaattgtcctttcttcatcccaagtaatgataaaagtctttttcaagccaaaaacttccgacattttatataaagccctgacctcccgttcccgggtaatcggatcatcaatgctatatgatacttgtatagccattccttcatcaggaatataaaaatccacctcaatacccttattataaaaaaacactctatcttcttcttttccatatcgctctattaaatttacagcaacgatattctccaatagtttagtttcggcatttatcagaaaattactgagcaacccattatcataaaaataccttttacaactagacatgcgttcagctactgaatctgtaaaattagggatgttaaaagtcaaataaacatcattcatataagtgagataatctgccaatgtattacggctaataccactaccagaagattttacaatatgcaatagtcgtgtctgcgtagttggctgcatgacactttcagcaagcttctttgccaatagccggatagcaccgctattgcgaatctcgttgcgtgctataatatctcccagtaaaatcttttgatataacgaattaatccattcccgtttatctatcaaagagaacgtttcggcaaatcctccgaaatgaaaataggtattgaactgcttaatgacttccagccgttgttccggttcaaattcccagtttgccttcaagtggatctgatgaaaagtgagatactctgcaaatgaaaagggaaatacttcccgtatgatatatcgtccacccaaagtagtggcaatatccctactaagcattcgcgcattacttccggtaatgaaaaccctatatttagaatcagccagcctacgagcaaatttttcccatccgtcaatattctgaatctcatcaagatagatcaaaggcttacggttatcatacatttcagcataacactccaacagaagtcctagctccgaagcctcaatagaagagatacgctcatcctcaaaattaatataaagacagtcttcaaaagtcactttacccaatcttacaagattctgtatatcctgatacatttgataagacttacccgcacgacgaataccaaccagaacataattcgcctgctcctcaaaatatatcggcctttcaaccagctgaatcttactaatttcttgctgacgctcggctataattgcctttattattcgtttttccataaaatatgctctttatattgcacaaatatagcaaaaatatgcttaatatagtaagcaagacttccttttctttccaactgtagctactattttctttagttgtcaactgctacttatcctttacaggacgaactttgacaggacagaagaagattacatataaatttgatgattcttattgtcaaccaaaatttttctccaatagtataatgattatcatcggtttacatgctgacaataagccatgacaataggctgacaataaaaaattagaacttttattgtcagcctgatccattttataagcacccgaaggacatcatcgcctgcagtaaccataccatccacatagaaagcagctttttaaaatgaatccccctattaaatgaatgttatatagccggatctttcacttaacaagcaggtattgttccattaaagcatcagtattgttaactctccacggccgtgacgatatctttccacggccgtggtaggaactcgtcacggctgtgggaagaagtcaccacggccgtgacaaagtaaagatagcggtacttcagtagaactatactggcactcaagagcaactacataggcacgttaatggaactatataggtagatatcactttgggaggctgttattaaaatgcgacatcacttcagaacatgcttataaagctactatttctcaagtcataaaaggatcgtaagagataaaaataaggctgacaataaaacaggtatgtttctttagattgaaggccatgacaaatatgcccagggtaaagaatttataaaaagaaagaaaaagtttgccgttcccttaagaataaatatctctgtaaccatggttacagtaaccacggttactaatataattcactgattatgaggttttataatagagaagaagaactataaaagctaaaacaaattcagcaattggcatttgaggaaagttcaagaatgacagtcgttaccggtcgccgtagaattgggaagacaagcctcatcatgaaagccgttgaaaagactcccactgtctacttatttatagggcgtaaaaatgaagcaaccttgtgcgaagaattcatcccacttatcgcacaagccctgcaaatctttgctccgacagaaatccgaagtttccgaaacttattccaatacctaatgcagctttcggcacaacggactttcaacctggttattgatgaatttcaggaattctatactataaatgaatccatattcagcgatatgcaaaatatttgggaccaatatcggaagtcctcacacatgaatttgattgtcagtggttccatctattctcttatgcaaaaaattttccaagacaacaaagaaccactcttcggaagagctgataacataatcaagcaatcagccttcagtctctctgtcctaaaagaaatcatgcatgaatatgccccgacacattcgaatgatgatcttttagcactttatacttttactggaggggtgcctaaatacgtggaacttttttgcgacaaccatacgcttcacgtggaaagcatgatccattttatggttcgcgatgaaacaatgtgtttgtcattggaagatatgtagtacatagttaggcacggatgacaggttttctatgaaatcagtccctcatcacctgtcatccgtgtccaatataatatcattgcaggttttcttcccggtctgtccggataaactccaaaagtcgttctactgcctcttcttcaggaatattcttttctacacagaccttgcctttataaagactgattttgcctcgtcctgctcctacataaccgtagtcagcatccgccatctcaccgggaccattcacgatacagcccatgataccgattttcagtcctgtcaggtgtgaggtagcagccttgatgcgggcaattgtcttctccaagtcgtaaagcgtacggccacaaccgggacaagatatgtattcagtcttagaggtacgggtacgtccggcctgcaagattccgaaagcagtagcgtcgacaacggcatggctcaaaccgccctgattgaacaggaagataccatcgcaaagcccgtcaaagatcagagcccccatatcggccgcagcttttatctgcaaatcctccgcatcatcttccgcataatgctggaagaaaacaaccggattttgcagcccctctgtcatcagttgatgcaccaacgcgcgatgttcacccaaacggttcggatggttgctttgagagacgacaaccacttcgggatgttgtttcagacaggcaatcacttcatccgtctgtgccatataaggcataaacaggaatttgagttctgcattacatcctcccatcaacggcagttgctgatgattataagcaggccaagtaccggcttctccggtccatacgtccgcatcaagaatatagtccacaccttcttcccgttgttcgggcaaagcacgtccggcataaatatagtccggagtaaattgcggattcacttcggtcttcccgtccatacggtcggcaatgaccacaggcacgtgttcacctcctatattgcggacagcccgcgtcttacggcgttcgggcgacaaatagttaaatccaggcgcttccagtccgggaatataaggatgattccgcctcaacaggatatagtccaccaacttacgggcaacaggaatttccgcttcgggagcttcgctcaaagatacccgtatagtatcccccagtccgtcggccaacagcgcaccaatgccgagagcggacttgatacgtccgtcctcaccgtctccggcttctgtcaccccgagatgcaacgggaaagccatcccttctttctccatcacagctaccaacagacgaacggttttcaccatgacaaccgtattggacgctttgatggaaataaccacatcggtaaagttctcatcaacacaaatgcgaagaaactccatacaagactctaccatgccttcgggcgtatcaccataacgggacatgatgcggtcggacaaagagccgtgattcacaccgatacggatagccgtatgattctctttgcagatattcagaaaaggcacaaagcggtcatgaattttttgtatttcctgcgcatactcctcgtcggtatattccagcttcttaaaagtacgtgcagcgtctacataattccccggattgatgcgtaccttttccgcatatcgggctgccacatcggcaactttcggattaaagtgtacatcggcaaccaacggaaccatatattcctgactgcgcaaaccgatattaatatttttcaggttctccgcttccttgataccttgcgtcgtcagacggacatactcaccgcccgcgtcgacaatacgtttcgcctgttccacacaagcctgcgtatcctgcgtagacgtattggtcatcgactggatacgaatagaattggggccacccaacggtacggccccaatattcacttcggtagtttccctccgaaaataattgaatagatccattagtttgttttatattcaaacttgacttctttcagttcttcgtttgcttttacgattttctttttcagtccttctttgtaagctgcaaatgcttccgccagcttttcatcactcaaagcaagcatctgaatggccagaatagccgcattcatcgctccgttgatagcaacagtggctacaggaatgcccggaggcatttgaatgatggaataaagtgcgtccacaccatcgagcacggagcctttcaccggcactccgattacaggaagtgtagtgttagccgcgattacaccgggaagggcggcagccattccggcagcagcgataattactttaatgccacgagtacgggcattcttagcaaactcttccacagcctcaggcgtgcggtgagcggaaagtgcgttcatttcgaacggtacatgcatatcattcagcagttgtgcggccttttccataactggaaggtcggacgtactgcccatgatgatacttacaattggagtcatatttttaatgtttaatttatccgttaatcacttctttatacccttccgcatccagcaagtcttctaccgccttcacatcagcaggtttcatcttaatcagccaaccctcgccgtatgggtctttgttcaccagttccgggttctcttccagcgcttcattctgttccagcacctcacctgctaccggcaggaaaagatcggaaattgttttcactacttcgatagttccgaaaacctcaccggcttccagcgactcaccgaccgtcggtatgtccacaaacacaatatcgcccaattgctcctgagcataatcggtgatacctacgtatgcaatgtctccttctacgcgtatccattcatgttcgttcgtgtacttcaaattctgtggaaagttcataataattagtttttaggatttatactgttttaaaataaaaatactcgaaataagatattactcaccggatgaagcaccaaaagggcgcataccaagccgaccgtaaaaccggaaatgacctctcccagcgtatgatgtcccagaatgatacgggcagaacccagcacaccggctatcaatataaacaggcacagccaccctaccgggttataaccgaacaaagcgctaaaggaaaccaatccgcctatcactccgcctatgcccgccatgtgctcgctcagtttccatctcagatttactgctatacaaataatggagactacgagagaagccagaataatgccggtcatgtaccaaggcagattcagcctatgcatcatcagcaggcagaatacatacgaaatgatagtcagcaggataggcacaaaacgtttcttccgttcgcccagctcctgacgggcaaaaccattgatcttgcggaacagaaagatggttatagtgggagtcaatatagtaaagcaatagacaattcccaatacaatcaacttatataccatcggcatgatacggagataagaaaacaggaataacaccagaaatgacaaaaacggaatagaaaacggggtaaacaccatcgaagtgactcttgccacctgcaacattgtcttatccgctatgatatgctctttctctctgtccattatcaattatctattaatcaattattttctaagtcttgccaccggaatattcaactgctgacggtatttcgccactgtccgacgtgcaatagggtagcctttttctttcagtatgtccgccaattcatcatcggtcaacggtttcttcttgtcttctccgtcgatacattctttcaaaatcttacgaatttcgcggacagacatctcttccccgtcttccgtcgtatatccgtcgctgaagaagaacttcaacggataaataccgaaattggtctgcgcatatttactgttgctgacacgggaaatggttgatatatccagtcccgtacgttcggccacatcttttagaatcatcggtttcagcagggattcgtccccttcgagaaagaaaggacgctgcaggtcgatgatagcctgcatagtagtcatcaacgtattctgccgctgtttgaccgcatctataaatccttgcgctgcatccatcttctgtttcagaaacatcatcgcttctttggactctttggactggttggccttattcttggtatgttcctccaccatctccgtaaaatcacggctcatacgaagctccggaacattacggttattaaggctgacattgatagtaccgtcatcatacgtttccacgatgaagtcggggactatctgctggaggttcctcccgatagcctctcccaaagaagctcccggacggggattcaactttgtaatctcactgatagcttcattgaatgtttcttcatcaacatccagcttttttataatcttttcccaatgcttccgggtaaattcttcataacaatctctgatgatgcgttcttcgatatccaatataggagcaggattcatcccttcttccttcttccggcggatctgtatcaacagacattcttgaaggtcacgtgctccgatacctgccggatcgaaatcctgcaagatgcagagtgcttcttccagctcctcttccgtagattctataccggcataaatagccagttcgtcacagatactttccaaagatttgcggagcaggccgtcatcgtccaacgagccgatcaggtattccaccagttcatgctggtgttctgtcaaattgcgttcacgaagctgctccttcagtatttcgtaaaaagaggtagagtcggagaacggaatatcttccgcctgctcgtctttagatcggttgttctcttgcagtttgtagtcgggaatatcgtcttcggtgagataatcactcaaagaatcgtattcgttggcatcattctccataccctccccggaagtgtcaccatcggaatattcatctgcgacattctcttctttgccctcctcaagtgccgggttttcaagcagttcagcatggatacggtcttccagctctactgcgggaagctccaacagtttcacgactagaatctgctgaggcgagagcgtttggatttgctgttgcgcctgcgattgtatttgacgggaaccttgtgccatattcgtttttgctttctactctgtttctcgctacaaaagtaactttttaaccagagattacacagattagaggaataatttttaatcctataacacaaaaatcgttatctttgttgcacgaacttaaaattagaacaatatgtttgccaaagaaacgtatatgcagcgaagagccctgctgaaaaagaaattaggctccggagttttgttatttctaggaaatgacgagtgcggactaaattacgaagataacaccttccgctatcgtcaggattctactttcctttattatttcggactgtcatgtgcaggactttcggcaataatcgatattgacgaaaacaaggaaattattttcggtgatgaattatcaattgatgccatcgtgtggatggggtcacaacctacactacaagaaaaatgcgaacgggtgggcgtggctaacttactgccatccgcagaaatagtcagctatctccataaatgtgtccaaaaagggaagtcagtgcattatctacctccttaccgtcccgaacataagctaaaactgatggattggctgggtatcccccctgcacatcaggaaggttccgttccattcatccgcgccgtagtagcccagcggaactataaatcggcagaagaaatcgtagagatagaaaaggcttgcaatgtgactgccgatatgcatatcaccgccatgaaagtacttcgtccgggtatgtatgaatatgaagtggtggcggaaatgaaccgggtagcggaatccaataactgcgaactttctttcgctacaatcgctaccatcaacggacaaactttgcataaccattatcacggcaataaagtaaaaccgggtgatctgtttttaatagatgccggtgcggaggttgaatcgggatatgcaggagatatgtcatctaccattcctgccgacaagaaattcacgccccgccaacgggaagtctacgagatacagaatgccatgcatctggaatcggttaaagcactccgaccgggcattccttatatggatgtatacgaattgtccgcccgtgtcatggttgatggaatgaaagctctcggactgatgaaaggcaatgcggaagacgctgttcgcgaaggtgcgcacgccttattctatccgcatggattaggccacatgatggggctggatgtacacgacatggaaaatctgggagaaatatgggtaggctacaacggtcagccgaaaagtacgcagttcggccgtaagtcacaacgccttgccatacctctggaacctggatttgtacatacggtagaaccgggtatatactttattccggaattgatcgatatgtggaaagcggaaaagaaatttaccgatttcatcaactacgacgtagtggaaacttataaagatttcggcggtatccgcaatgaagaagattatctgattaccgaaaccggcgcccgtcgattaggcaagaagattcctttaacgccagaagaagtggaggctttgcgataattgttcaccacagattacacggattaacacagataataaaatagacattgataatcaatgtattaatctaatctgtgttaatccgtgtaatctgtggtaaaaatgacttcaatcatcccaatcggataaaggtaatactttctttccataccacctcatccaggcatacgccttcctttttctaagataaagtgtatcaccacaattctccagtgcctcccaatcaaagacagagtgagagcggaaggacttctccaaccaataaaagatgtggtaagtcgcaaagggaagcaacatccaccaccatgagaagaacaacgacaagaccaaagcgggtagcaacgtcaacaagaagcattcccagaactgccttgcatggattctgacttccatatcttcccaaatctccaaatatttatatcgggtaaaaaaaagaccacccaacataaaacaatgcttctttccttttcttaagaaccattttgccaaaagattattataaaaaatcatactcttactatttttgcatataatctacttaacagaatataaaatcaaaggtttaggcttttagcgtttaatatcattatacacaccctcttcccacttaatatttaaagctgcttcccccaagaaattcgcgaagcaaagaagtcggcggaatttccttatcctgtacgggaacgaaatatttgataaacttcaataaccgataagcctcgcaatattcgggacaattacgcggtactcccatcaatataggctcggcatggagacgaagcacggcaaactcgaaaagcagtgccgagttaaacattacatctgcattttcctgataagggaagatccacttgtcttcacccgcacgcacactaggccaacgcgagattgtctcacgggcagaatatccccgataattgaaatcacggataatacggcgtaacaaacgattgtccgttgtcggaatccagttgtggtcgtccaacgaaatggtcgtcaacgcagaaacataaatcttgaacttccgttctgccggaatatgaggagtaagttcgggatttaaggcatgaataccttccaggattaatatcgtattatctttaattttcagtttatcacccttatactctttctttccgagtgagaagttaaaacggggaagttccacctcctctccacgaagcaatgcctgcaactgccgattaaacagttccaagtcgagcgcgtaaagcgattcataatcatagtttccgttctcatccaacggcgtatcttcacggtctacaaaataattatcgagagaaataggatatggctttaacccgttcgtcataagctgaatagaaaggcgtttgctgaaagtagtctttcccgaagaagatggtccggctatcagcaccagtttcacccggtttccgttttctccccgatggaaaatggtatcggcaatctgagcaatcttcttttcctgcaatgcttccgcaacgtttatcaaatccgtcgcgtgtcctacttcacatgccagattgaaatcacccgcattgttaagccccatgatatagctccaattcagatattccttaaagacatccagcatcttctcctgcttcacgacatcttccaagacttccggattctcacggctcggaatgcgaagaagtaatccatcgtaatatttcacaatgtcgaacagtttcagatacccggtgctgggcaacagattaccatagtaataatcgaccgtatctcccaacgtataataataggtatagagagaaccggaagtttcgagcaatctgaccttatcattcattccccgttcgctgaaaatacgcacagcctcagttgtatggcattcaatgcgatgataaggaatatcctcagcaataatttcctgcatacgctgcttgatacgcatcacgtcttccagctccacaggacgcccgatccgcaaattgcagaaatatccttttgagacagggtgctctacaaacaattttccttccgggaacaattccgtgacagccttgaacagtacaaagcaaagcgaacggacataagtccgcataccggactggtcacgcacatccagaaactctatgtccttattattatagactctgaaattaagcccttcagatcggttattgactttggcgctaaccacctggtaaggaaaattaagattaaaaccgtaataaatatccaaaagtgagctcccgatagggaattctttagaaatattattatttttgcaacatatttgtaacatctgtttcatcgagttcgttaaaaggtgaatattatgggactaaatatacttataatcagattgagaacaaataaccattaaaaatattatagatggaatattctttttatgattttttaaagctcataggctcattaggactcttcctttacggaatgaagatcatgagcgagggcttacaaaaggtcgcgggtgacaggctacgaagtatcttgacggcaatgactaccaatcgggtaacgggtgttttaacaggtgtgctaatcacagcccttatccagtcctcttcagcaacgactgtaatggtcgtaagtttcgttaatgcaggactgctcactcttgccgaatccatcagcgtcattatgggcgccaatatcggtactaccgtaaccgcctggattatttctattttcggatttaaggttgacatggccgcattcgcccttccacttctggccattgcccttccgcttatcttctcaggcaaaagcaaccgcaaatccatcggtgaattcattttcggtttctctttcttatttatgggactttcttacttgaaagccaatgctcccgacttgaacgccaatccggaaatgcttgcctttgtacagaactatacggatatgggatttttctccatcctcctgttcttattcatcggtactatactgaccatgatcgtacaggcctccgccgctacgatggcaatcacgctaatcatgtgtgccaacggctggatcagcctggaattgggagctgccctcgtattgggtgaaaatatcggaacaaccatcaccgccaatctcgccgcattgacagccaacacacaggctaagcgggcagcattggcacattttgtattcaatgtattcggtgttatctgggtgctgattattttccatcctttcatgcagatggttaactgggtagtagacactttcttccaaagcagcgatccggaagtcgccatctcctacaaattgtcggctttccactctatcttcaacatctgtaacgtatgtatcctgatatggggcgtgaaattgattgaacgtaccgtatgcgctttgattcatccgaaagaagaagacgaagaaccccgcctgcggtttatcactggtggtatgctttccactgctgaactttctatccttcaggcacgtaaggaaatccatctctttgcagaacgtacccaccggatgttcggtatggttcaggatctgttacatacggaaaaggatgatgacttcaacaagctgtttagccgaatagaaaaatatgagaatatcagtgataacatggaactggaaattgccaattatctgaatcaggtttctgaaggacgcttaagttcggaaagtaaattgcagatacgtgccatgttgcgggaagtgacggaaatcgaaagtattggtgacagttgttataatctggcacgcaccatcaaccggaaacgtcagaccaaccaggattttaccgagaaacaatatgagcatattcatttcatgatgaaactgacgaacgatgcacttgctcaaatgattgtggtagtagaaaaaccggaacatcagagcatcgatatcaacaagtccttcaacatcgagaatgaaattaacaactaccgtaaccaactgaagaatcagaacattctggacgtaaacaacaaagaatacgattatcagatgggagtttactatatggatattatcgccgaatgcgagaaactgggtgactatgtggtaaatgtggtagaagccagcagtgatgtaaaagagaagaaagcttcttaaaaagagattaattgaaccataaaaagaggagaatcggcaatacatatgagccattgattctccttttttattttcaaaattacccttctaatacttgatatagagtatttatacaagaatcaatcatttttaataacttggcactgtccataattttatgtaaataaaatatttaatagtgccaatagcctcaaatggatataaaatgaaagcacaagtattagaggggcaaaattgggttaaaaagccgggggcggactctcggttcgaccccggcaaggaattttcttatgctattgctatttgaagaaatggagaactgttactttttcatgacgatgtaaccgtagtcaatgttttcgttctctatgtcaaccttagcaaagagaacggcgatagcttcggcatcatcgcgtactatttgtgcttgatagccgggatatgattgcgaatcttcgaaagcgtaaacatagtggaatgtacaaccatttaccgtttcacccacagtagcagtttcgggatattctatgacagcttgcccataacaataccagctgctaccgtattcccaaccaaccttacaagtgctgttctctgtcgcttcaccggtataatgagttccagagttaatatagtaatcccagtagctcggacgaggtcctgttagaccggcaacctctatattgcaatagtcggtagtgatttcttttattatggcaatacgttcgggggtgaatacatcaaacgatgctttcacagtaaccgttacctctgcagtgcaattcgactggtctcttacggtcacgatgccggtgtactcttctttggacgcggtggcgcgtacaattactttggctgtttcgtttccttcattgtcgactgtagaactgatttcagctctaatgcgctcatcgcctgattctacagagtaaccgccattgccaagtaccacttcaatctgattgttcgactcggttttgcctaatagacaattgaagtcgagcgtctgcatattgagtaccaactcgtcggttgtatagacctgtatagggagtcgtttgtagtgaccgcccgcatcggatacaacgatatgggttgaaccgttatggaagccctcaacaaatacgtcaccgttttcaatggtggctttcgctacgttttcgtccaaagaaaacgcgttatattgaccttcacccgctgcaacaggaatcaaggttttgttttcttcaccgattttcacacgtagtgcatccacgccgaaagtcagttccgaatttacgattttgtcgtcgtcatcgtcgctacatgaggcaagatagccgcatgaagtagcaagtaccaaactgataatatagtattttagtttcatgatataaactgttttttagattagagccagtccttaggataagttttgccatcgtagacaaggtcgtcgtcatagaaggctctcgcggagttttgcatggcgctttggcgcatacggttgccgaagtgaacgtgcaggccatagccgtcattgcgcagttgagagaggttaccataagtgctaccctgcgtgaactcccatgagtagtgaccgaggttgaatttgggtacaccgggaaagtctgcggggtcaatcggaccaccgccgtagttggtccagatgaagtccatatactcgccgggctgtacgccatctactgagggcagactactaaagtcgtaagtgtaaatgatgttgtcacgatgcggctgtagtttcttcacttcgtagaagaggcgtgctgctgcagtataggacggattaacaaagccttcgggtgccggggagatggggctgccatactcggaattgtagaacacgccatcgagtttgtatacatcgcagtaattctttatttcctgagcgtagtagcgggcggtctcatcggcaaggttgttaacgtttgcgcggtcgtgattgccaagaatcgaaagataaactttgatgccgcgatcttgcaggggctgcaggtagtggtcgcggttagccaatatcgcgctgacgttttcattgcagttgacatacacgcgtccggtttcttcgttgtagttgatgttagccgcaaagagcattaccgcatcataatacatctttccgctattcttaagtgtgtaggatgtaacttccagcgggttcatgtcgttcacctccatacacatcatagtgcgtacagccggaacttccacgccatccttgagcacggtttttgtagcatcgggcagaccagtgaggtcgcggacaaaaatcaagcgagacgagctgtttttggtgagtgcggtttcgccgttgttgactgaagcgcgcagcggaatcgcatatcctttatcgttatcgagagatccgtcagacgtgacggttacggtcatcggctgagaaatggtgtttccggcttccagacgagtgatgccgtcgttggtcaagctgaccatcgatttcggtacggcttcgtaacttgtgccgttggcggcgttgtattcggcgagaactgtttcatcgtatacgaaagctatgttgcagtcgcgtttgagtgccttaggagtattgacatatagaggtatgtctttggtgtcgcgtaagtcgatgtgggtgaataggcgcttaccatccgggtcggtcacatataccacttcgccgggcactgatagattgggattgttagctttaccaatcattacttcatcctcgcaggcagtgagtgaagccgctgccaagagaattccatatataaaaattttattcagtttcatattgctttgattgatttaaattcaatttatttttcagggagagataccggaacccaaataacgttggtattggctttaaggtcataaccgttggcgtagtcttggaggttgttgccggaaccttcgttcatcttccaataagctacaagaccttcgctgtcaggggccactttatagaagtggtttctagcctgaagttcttctttggcaaggatacgattccaaacacgcacctcgcagatgtcaccggagaagtcacggttgttgttccaagacctgcctacataaaactcagaactgttccagttcacggaagaacgattgctgctgttttgtgtctcacctttctgcacaccgtcgatgaagaaggcacactgaccattggtggaatcgtacgtaaaggtgatgaactgccatttctccttctcaattttccactgagagttggttacgttctggctgttagcaaactgcaactggtcggatgctacgccagcgtcaccgaagcgaagaagagattttccttcgataccaagtaacgtagaaatgcccgaatcgtttccgtcactgaagttagctcccggacggataagagcctctacggtaactctctgcatgcttccaagcttgccggctgcgcttgggctagcaaggctgaggtagttttcgttgagattggcagtccagttaatcaatgatgcaccgcgaatcacgaaatacttagtgctcttgttagcaagtactggaatagaggcactcgctacagtgatgggcaaacagtacacattgtcggggtcgatagccgtgagattttgcaaaacaatcgaaaccggactggcacttactccgcccacttcaaattcggctaccggatcagcaatggagtagtattcttcggggagcatgattgtgcttgtcttgtacacttcattgtatactttaaccaacgaggggtctacagcgtatgtcatagtgagtgcctgagcggtgggttgtggaatgtatgcctgtaaagtgtaggatgcggtttccgcttcaccgtcgaggagcactgaggtcacttcggttgtgccgtcgacatagattttgttgtcaatcttttccacgtcttcgttgcaggagctcacaagcacgccggtagcgagaactgtgtaaattgacagatatttaaatgttttcattgtttctgtttatttgcttaatgattacaaattgcttgggttaagtgtctgaagcgctttacgaactacctgatagggacttgtggcgttgtaatagtcgtatgcgatgtttgtaaacgcgcaagctttcacattctcaccactagcccagttggcaagcgatgacacacaaagagaaccgtcggccatatatccgattttatcatcgtttgggtcggtatagcttgtaaccatacctatgcggtcggcaggaactccctctatcgaggcattggcaagagccatattaaaaccatagttcgaattggctgattgtgattcggaaaggaataaaacgttgcagtcgttaatgagatccttatcgcccacgttttgaggttttccgataaagtcaatatccatttcaggatttcgcgcgtgccaatcggacataataccgatgaagttcttctcgttggctaggtattccgtcttttcggctggtgtcatgtgattagtgattttaccgttgtagccaatcatgatgccattgaagttgtttttcttggcatatgagagggcggttgcggtagagtcggtcaggaagtcgagaaattcaacggcgaaaggttcttcttcggtcgacattgcctgatgctcaagataggcaagtttgatggcatcgaagtcaatcacataagtaaacttcatgtttttcttttctcgtacgttttccatgtcgcgaacggtgatgtcactaatcgaagtcgggtttgtgaacacgacaacgtctattgaatcaggcagctcgtcaacgcgctgagcacgagtgttgatgttttcgccttttcctagattgttgaaccacacataaacaagtttgtggtcggtttcgcgatagtcgcgaagtgcttcaaggtattcttcgtatgccaccggatcagtcttgtctgcggtatcatagttaaggtctacgttttccggttcgacccagtcgtcacacgatgaaaatgtggcggctgatacgcaagtggcaagaagtgccagtccgaatttagatattttgttcataatagatctttttattagtgttgagaaaatcaaagtccgggtttgcaagcccaccatactttagttgccagattgtcgggaccgttgaggtagttggaaacggcagactgtacgttggtgaggttgtcggtatattcagccgcaggataaggcaagcgctgcggaccgcgattgatgtctaccacatttgaaccgttgtaagcaaccggaatcaggaacggatatcctgtgcggcgatagtcggcccaagcttcattgccgagcttccagttggcaatccatttctgggtaataatcttctgctgtttctgttctgctgtgagtgtttcatcccacttgatggttaccgcaggaattacacctgtccagggattctgaccttcgggatcgtaaaacttggcaggtacagatgtggcatcgttgatatacgtgttgtaaccgtcggccacaccgtagtcttccatagagaggcggataccatcattgtagaacgattcggccgatcccctcatgtcccaattgaaaactgctgcaccttcggcacgcaaaaagcatacttctgaagcattcatccaaagagccggcgtggtgccgggaaggttgacatcggagaagttgacgctccatgaggtgctgaatgtctcccaacctcgacggatacctacatactgcagcgatgtgccgtcgggggctgtcatccatgttccatcgtcatttttgtatggcttgccattgagtccgggcgattcaggagaacctgattcggtgaggtatttggagatacgcgggtccttgtaaccgttgaggtaacaagcaatttcggccgacggacgggtgtcatgagcgttgtacatgatagccgtacgcatagagttggtcgatgtctggtagtttttccaagttgcgttctgatcgttcgtctcgattacacctccatttttagggtcgatggcatcttcggctttggcctgagccaattctttattggcatagctgatgcgcaaggccagacgcaactggagtgaattggcaaagcgtacccaattgctgatgtcgccgccataaactttgtcgaccaacggactcatcactgctgtggggttgtcaagcagtatctgacgggcagcggcgagctcttcgaagaatttgttgtagacatcttcttgagagtcgtaaggagtcttgattgcgccttcaaagccgatggccgagtaggggattggaccgtaacagtcggttactcggtgcatcgcggcaatcttgatgatgttggctacagccattggcactatgtcgcctgatgtttcgcagaaaccctcaaccatcgaaaggttggtgaaaagagtagaaataatcttcttgtctttcaagaatacctcagtccagttgttgggcgcattgttgcgcacataagaggaagtaaagtttgctccgtcggagaagtaacctccgagtgtaccgccgagaagacagtccacaaactgggtacagtttacatcagaaggagcgacagtgctgcagatatttgtcattgacgataccaaagcgaaaccgtcgggagtaagatcgcccggttgtgactgattggagttgatgtccaggtagttacctgtgcaggctactgtggtgagcagcactgcgcctccagccaatattttgttgaatatatgtttcattttttttatcgcttgagttagaaattgaagttaacgttgaagccgaagttacgtagtgaaggcatcatgaagttgtcgataccttggaaatagttaccggctgatgctacggattcgggatcataaggagccttgttgtaaatcatccataggttgcgccctacgagtgataccttgatgtcgcaaacgcctttgagccatttgcgcggaatcttgtagccgatagttgcttcgcgtaggcgcagattggttgcagagtaggtatagtattgaggaacggtttcaccaccggcaacgagattataccattgctcggggttgatgccatcgccgttattgatgcttacgaaaccccggtcgcgagcttggcctgtagcctcagacacaccatagtagtcaaggactgcctgggtgcgtgagtaaacgacccccccgaaacgcgctgagagcatgaagcttgcagtgaggtttttccatgtgaagctgttgctccaagcgaggttgcctttgggaagaaccgaaccgagcttgatgggtttgtctgctacagaaacggtagatacattgccttcggggttgatgtagatattaccgttgtggtcgcgttgtaaatctaccatagagtagaggtcacccattgtgccgccttcgcggaggatgaagcgtgttgcgcctacttggttgtcggtcatgacgagctggtcgatgtcgagtttttcaccggtaacggggttgtatgcgttgcgtcccagttccttaatcacgtttttgttgaacgaataggtcatgttggaagcccaagagaagttattccatgtatgatcgaagccgagggcgaactccataccccagttgcggattttacctgtctgaacataaatcttagaatatttgcccacaggaacattggggttgaatgtctggttgtaggtgtcggcctgataccatgtagcgtcgaagttgaaatctttcaagaagcggaagttcatacctacttcccaagatttggtacgttcgggcaataggttgtttacgggatactgggtcaaaacggaccaagtgccgtttacccattcatagcgcgggttggcgatgtagcgcgggaaagcagtacctaccgatgcccatgatgcacggattttccagaatgacagatattctgagggaatgttgagaccggcatcttcgaacaattgggtcattaaaacagatatacctacagacgggtagaagaatgaagacttcttcgagttgacaccggcaagagccgaaggccagtcgttacgaccggtcaatgtcaggtagtaggtacgtttatatccaaggtcgacagaagcgtagattgactgggtctgttcgcgccacatattccaagtctttggagcattgcgagagatgttgttgatagagaaaaagtttgtcagcaatgcgtcttgtccgggatagttttctgaaccatcggggataccgccacggatgtcagttgattcgtaacgcatatcgttgattgagccaccgaagttggcttgtaaattccaatcttcactgaagtctttgttgaacgatgcaaggaagtcggcaaagatttgcttctccttgtagttcgtttcaccatagtaaccgcgttctgagttgtcagaaaggttgccgagagtacctgcataacgtttgtcggtcgccttggtgtaagaatcgtcgaagcgtacacgtccgctcaatgttagacagggtaacaccttgtacgaaagttgtgcgcctaccatgtaacggtttttggagttctcgcgcaggttacggtagttcacccaataggggttttgcacggtcagaccatattcgccccattgccagttttgggtggaaatcttacgagcagggtcgtaaacctcgtatgcgcgcacttcgtcccagttgttaccgcgggggaagagataggcacccacaatggggttcatgtaagaaccttgattaatcatgttacggtccatctggtagatgtagcttgcgttcaaatccaatgtcatcttgtcgttgagaaacttagatgtgttacgatagttgaagttgtagcggttgtagcgctcgttgggtacaatacctttagaattggtagctgccaccgaagcgtaggtttggttgcgttcggtgcccgaagagaaagtaaccgaattggtggcaacaaaaccagtctgcaagtagtcatcagccacatcgtaaccgtagtcgttgtacggtgtgaggcgggcaccccagctgtaagatgaagtggaggcataaatactgttttgacctgcgccgtagctgctttggaatcggggcagaatccatgcacgattccattcgaggttcgaactagctgtaaccttagcctttcctgtctgacctttcttggtcgtgataacgatagcaccgttggcagctgcagaaccgtaaagggcggcagcggcggcaccggtcagcactgacattgactcgacatcgtcggggttgaggtcggcaatcggctcggtagcaccctttgaaccgaatgcaccggcgtcaccttctgaactggcactacgcatgggtacaccatcaacaacatagagagcgttggacgactgcataattgatttggtaccacgcatcactacctttgatataccaccggtacccgatgatgaggcgttgatgtttacaccggccactttacctgccagcgagttgacgaagttggcatccttgttggtggtcagcatatcgcctttcacctgctgaacgttgtacgaaagtgatttctgctcgcgcttgatgccgagcgcagtcaccaccacttcatcaagtttttttgcgtcctcaatcatcgtgatattaatcgatgaagaggaactcgttactgtaacctcttgaggttgatagcctacataactaaatttcagcacatcaccttcggccacatcaatggaaaattctccatcaaggtttgtcagagtccctgtcgatgtgccttttaccaagattgacacaccaattagaggctcaccgctgttgtctatcaccctacctgtcacttttatgttggcagcgaaagccaacatgggcaaaaacatgagagcgaagaacagacttgttacttttgccttcataacttttttagtttgattaataataatgaattgttctagatttagaaacggggggtctatagtaaaatgcataatgcgaagtcgtttacgagcctggatacacctaggttgtactaaaacagatttagtcttttggagacattgacctaaatgagtagagaaatgtccggttgtggttaaattcatagttttataaaggctaaattatttatattcaaatgttaacgactgatcagttgaaactttcccgtaacttaaagatgtaaggtcaacaaaagctatgagtgattttccaattagcctagtcgaagaacgttacaaacataaataatatattcataataagcaaggaagtagacgaaaataatctcaaaaaattataagcggcatattccgggagtttactatatagatattatcgccgaatgcgagaaactgggtgactatgtggtaaatgtggtagaagccagcagtgatgtaaaagagaagaaagcttcctgataaaacaaaatcaacagaagcaccgggtcctgctgctcataattcagttgatgtgtcttgaaaatgactattgagtatagtagatgcacaaggaatcgatgaaaattcgatgcttgtgcatctttttaattagtagtaggacaaaatgtgattgagaatttgctaattccaatattaattttaatatttgcataacaactatagtatcaattgaaaacaaaagatgaaataatcgctattctccggaattttaaagaagagtttggggagagatatggaattgaaaagttgggacttttcggttctgtggtccgtggtgaacagaaggaagatagtgatattgatatttgtattaaactccaagagcctgattattttactcgaatggaaataaaagagtttttagaaaagctttttaatgcaaaagtggatgtcgtgtctttaaccgcaattatgcgtagtttatttcgaaatcatatagagaaagatgcaatttatatctaatgccgacataatacttatctattgatcccgaagagatttttaaaatagtaaaagtacatttaccaaaactgcttcttgcgattcagctgattagaaatgatattgccgctaatatataaatccaatgtcttgtattgccgcaaaaaaaagaccgggcatggcactgtccacaattttgtgtaaatagaaaacttcaggattcgggttttatacttgaatcctgttttcaaatatagtaataaattggttaaatatcaatgcccaattccaaataggttggtaccatttcttttcgatttcgttaatggccagatagacagattttttcagtgcatcatcatttggaaatgatagcttatttttggtgtactttctaattttcccattcagattttcaataagattagtggtatagataatctttctaatctcgacggggaaatcaaagaatacggtcagttcttcccaattatttctccatgagcgtatcgcatatggatatttagcaccccatttttgctcaaagttatccaactccatctcagctgcttctttagtaggtgcattatagatgttctttaaatcggcagtgaattcctttttttctttccagacgacatagcgacaagagtttctaatttggtgtaccacacatatttgagtagtagaggcaggaaatacactcttgatggtttccgtaaatccattcaggttatcagtaactgtaatcagaatatcttctacaccacgggctttgagatctgttaaaacgcccatccagaaagcggcactctcatttttgccaatccacatacccaatacttctttcaagccttccttattcagacctacacataggtaaacagtcttgttgatcactttgccgttttctctgactttgaatacgatgccatccatccagacaatcatatataaactgtccaaaggacgattttgccactctgttgcagcctggctaactttattggtgataatggagatagcggaggtagagaggttaataccgtatatttcctgcatttccgactcaatatcagcgacgctcatacctttggcataaagagagatgacaagacgctcgatagataagccgcgggattgatgcttgggaacgacaataggctcaaattcaccttcccgatcacgaggaacctgaataacagatttacccatctcggtttgaatctgcttcctataactaccattgcgggagttgccactatgatctccttgattggagtgtttctcataacctaaatggttatccatctctgcttccagcatttgttcataaacacgagtatgaagctctttcatgaaagcagtaacatcttcgccagtcttaaactgggacagaaactctttacttaaaaattctttaggaatgtccataaaatctgatttttacaaagttaatatataaataaaaaaactacgagaaaaatcccgtagttttctatttacacaatcagatggatagtcccccgggcatatatctatacacccagccatttttctctcaataaattctctctcttttaattttaatcttcgtacggttcgaaatcttcctttccaactccgcacagaggacacgtccaatcttctggaatgtcttcaaacgcagttcccggttcaattccgctttccggatctccttgttcagggtcgtaaatatattcacagaccgtgcaaatgtacttcttcataatgttcgtctttttattggttttctgtataataaaacacataaagcaatatatttgttcaacactttattcaaatattgaaagaaaaaactatctttgtagctagatccatcaaactaaaacaaagataccagccatgctcatcgcattatcatccacttttatagtcttatccattatactattagtcagcttcttatgggagcgaaagaaatgtcttcggatacaaaaacgattattccgagaatccaggaaattagaccgtaccaatcatatcaccagcgctattctaaagaatgtacacgcctacatcctactgatagacaatgatttcaaagtgctcaaaaccaattactatcaaaagacagggacaagaaaagggctggaagaaaaaagagtgggtgacttgttacaatgccgtaatgccttatcctctcaaggaggttgcggcacgcacgatctttgcggctcttgtccgatacgctttgccatccgtcaggcttttgaacacaaaaaaagtttcaccgatctcgaagcggcactaacagttgtaacagccgacgatcaggccgttgaatgcgacgctatcatatccggctcctactttcttctgaatgatgaagaaaacatgatactcaccgtgcatgacatcacccgcttgaaaaatacggaaaaagagttggaacttgccaaagagaaagccgataacggagaaccacagtaataaatccaacttcataaaaagttttaattaaacagtcaatcacaattttatattgtacttttgcaactcaaactaaacgcatgtatccgcatgagtacaaataaaaatgacatttatcacataggacttaccgataatgaggtcctgcaaagcagggaaaagaatggcgccaacctgctgacaccccccaagcgtccctctctgtggaggctatatttagagaaatttgaagaccccgttgtacgcgtactgttggtagcagccgtattttcgttaataatttctatcatcgagaatgaatatgccgaaacgatcggaattatagccgctatcttgctcgccaccggaattggttttttcttcgaatatgatgcgaacaagaaatttgacttactgaatgcggtcaatgaagagactttagttaaagtcatccgaaacggtcgtgtacaggaaattccgcgcagagatatcgtagtcggcgatgtcgttattctggaaaccggcgaagagattcctgccgatggagagctgcttgaagccatttctctgcaagtaaatgaatcgaatctgacgggagaacctgttatcaacaaaacaaccgtaaaagaggacttcgatgaagaagcgacatacgcctccaatctggtaatgcgaggcactaccgtagttgacggtcacggcacgatgcgcgttctccaagtaggtgatgcgactgagattggaaaggtagcccgtcaaagtaccgaagagagcctagaaccgactccgttaaacatacagctgaccagactcgccaacctgatcggaaagattggttttaccgttgccggtctcgctttccttattttctttgtcaaagacgtattgttctacttcgacttcggagcattgaacggctggcatgaatggttaccggtttttgaacggactctcaaatatttcatgatggctgtcaccttaatagtagtagccgttcccgaagggctaccaatgagtgtcacactcagtctggcactgaatatgcgccgtatgcttgccaccaacaacctcgtacgaaagatgcacgcttgcgaaacaatgggagctatcaccgtgatatgtacggacaagacgggtacactgacgcaaaacctgatgcaagtgcacgagcccaacttctatggtttaaagaacggcaacgaattatccgacgacgatatcagcaaacttatcaccgaaggtatcagcgccaattctactgcttttcttgaagagaccgacaccggtgaaaagccgaaaggtgtgggaaatcccaccgaagtagcactattgctatggctcaatagtcaaggaaggaattatctgaaactccgcgaaaacgcacagatcctcgatcagctgactttctccacagaacggaagtttatggcaacgcttgtagagtcggccttgctgggaaagaaaattctctatataaaaggtgctcctgagatagtgctcggaaagtgcaaaaaagtcatgttggacggacagcaggtagacgctaccgaatatcgtccgacagttgaagcacaactgctgaactaccagaacatggccatgcgcacattgggattcgccttcaagattgtaggagagaatgaaccggacgattgcacggcattggtatcggccaacgacctaaacttcttaggtatcgtagccatatccgacccgattcgtccggatgtgccgaccgcagttgccaaatgtcagtcggcaggtataggaatcaaaattgtgaccggtgatactccgggaaccgctacggaaatcgcacgtcagattggtctttggaatccggaaacggatacggagcggaatcgcattaccggagttgctttctccgatttgagtgatgaggaagcattggaccgtgtgatggatcttaaaatcatgtcccgtgcccgtcctacggataaacaacgtctggtgcaattgctccaacagaaaggggcggtagtagccgtaaccggtgacggaaccaacgacgccccggctttgaatcatgcccaagtaggtttgtcaatgggtacaggcacttccgttgccaaagaggccagcgacattacccttctcgatgattcattcaacagtatcggaactgccgtgatgtggggacgttcactgtataagaacatccagcgtttcatcgtattccagttgactatcaattttgtcgcgctattgattgtcctgctcggttcggtgataggcacggaactgccgttgaccgtaacacagatgttatgggtaaatctgatcatggacacttttgccgctctagctttggcttctattccgccaagtgaaaccgttatgcttgaaaagccccgccgcagcactgactttattatcagtaaagcgatgcggtctaatataataggtgtaggttctgttttccttatcatactgctcggaatgatctactatttcgaccacagcacacaaggtatggatatacacaatctcaccgttttctttaccttctttgtcatgctgcaattctggaacctgttcaatgcccgtgtattcggtactaccgattcggcattcaaaggcctttccaaatcgtatgggatggagttaattgtattggccatcttagtcggacagttcctgatcgtacagttcggtggagctgtattccgcacagaaccgcttgactggcagacgtggcttcttattataggcgtttcgtccatggtgttatgggttggagaacttattcgccttgttcaacgtatgattcacaaaaaagaaagaaatgaaaaataaagggatcaaaaaccttcttattgatttgggcggtgtacttatcaatctcgaccgccaacgatgtatggagaactttaagaaattagggttcacggatgtagaagaacgtttgaatatccaacagttgaacggtatcttcatgcaacaggaaaaaggcttgattacttccgcagagtttaggaacgggatgcgggaaatgatcggtaaagcagtcagcgacaaacaaatcgatgaggcttggaacagtttcctgatagacatccccacatacaagcttgacttacttttgaaattgcgtgaaaaatatgtagtctacctgcttagcaatacgaatgagattcattggaaatgggcttgcgagaatgcgttcccataccgtacgttcaaagcagaagactattttgaaaaaacatacctctcatacgagatgcacctggtaaagcctgagcccgaaatttttaaagcagtcatcgaagatgcaggtatcgaaccgcaggaaacgtttttcattgacgattctgagatgaattgcaaagcagcccgagaactcggaatctcgacttatacccccaaagccggagaagactggagccacctttttaagaacaagtaaattcgtagagatgcagattatacgtgacatatcgactcttcgcccggaaccctccatagctaccatcggcttcttcgatggagtgcatacgggacatcgctatctgatccgacaagtgaaagagatagcggccgccaaaggtttacgttctgcattagtgacttttccggtacatccccgcaaggtgatgaacgccgattatcgtcctgagttactgactactccggaagagaaaataagactgctggatgacatcggagtagattattgtctcatgcttaactttactcctgagatttcccggctgacagcccgcgagtttatggctcaagtgctgaaagaacgctatcaggtaaaatgcttagtcatcggttacgatcaccgtttcggtcacaaccgcagtgaaggtttcgaggattacgtacgttacggtaaggaaataggcatagaagtgattcgtgctcacgcctataccaataatataaagacaggagaacatcagaataccccgatcagctcctccctgatccgcaaacttctgcatgaaggagaggtggaacaggccgctctttgtctgagatacgaatactttctggacggaacagtagtaggcggttatcaagtaggccggaaaataggttttcctaccgccaatttaagtgtagacgatccggataaactggttcccgcagacggagtttatgccgtatgggtcacattcgacggacaaacctatatgggaatgctgaacatcggtgtccgcccgactattgacaacggtcctaaccgtacaatcgaggtgaatatccttcacttccattctaacatatatgacaagtttatccggcttacgtttgtcaaacggacacgccccgaactgaaattcgccgacattcacgagctgatagtgcaattgcataaagacgccgaagagacggaaacaatccttcttggcaaacaagcagagcggtcaaaataacgaccgaactaaataacatataactgagtaataactttaaaagcagattcgtatgcaaaagacattcatgagtatctccctggtggtaatagcaatatcaatgctggccatgtttatatgcagtttcttcacaacccgataaagcataaaatggtatgaaaacggctatcaaattaatattaatagaccttgtcattgcgcagatcgccgctcctattctggtaatgattccctataccatctatttattggtcactaccgggaatctggataaaggtatactgacgcaagcaattatgattccggcacaattggcaggacaagtgatgatgggtatctatttatggaaagccggttatatcagtatgcaaaaaacaacgtggtctcccgtatcagcaggctatctgtcatgtagcgcattggccattctcacggccggatttgctgtatccgcattgatgggtctgctggattggatccctaatatcatggaacagtctttcgatattctccaatccggatggggaggtattctcgccatatccatcataggtcctgtactcgaagagttattgtttcgcggagcaatcaccaaagcattgttacagcaatacagtccggcaaaagcaattctcattgcagcattcctattcggtgtctttcatatcaatccagcccagatacttccggcattcttaatcggcatcctgctggcatggacattctacaaaaccggcagcttaatcccctgcatacttatgcatatactgaataattcgttgtcggtatatctcagtatcaagtttccggaagctgagaatatggacgacctgataaacggcaatttatatatttacgttcttgcaggagtctgtctcatattcatagcaaccatcctatatatgcagcgcatgacctctaataagtagaggtcatatcttccggaacacaaatatagaaatccgcccttcctttattctcttcatccaattgtccgatactctcctggcgcaccgaacaaacggtctttatcgtcgttcccggacgatattgaagcagatacggaatgattccgccttgaaagtccgaatggtagtttccattgaaatgaaggaacttgcttttcatattacgggcaataaaccatcccatcgtagcgtctttgatggcctgcgcctgtgccagatattccgcattccccttgcttttccccatcatgtgcatcaatgcgaaggctccctgttcctcttctttatatgtgaacgataccggaagaggcggcaaatagcgtttagcctcatcggacaatgagtccaaatactgcaatcccctgtctttcaccacgtttgcatagcgacggggaacattggtcgcaatgaacgggatacggttctccttagcaaagaacacaaacggagcataatccgtactataattgtcccacaaacgcgcttccgcttcaaaacggtcataagagatctgccgattcatatattcatccagaatcagttgattgtcggcctccagcatttccgcccccatcatcagtttatccttatgaatggcatacaaagaacgggcaagctcgtactccagccaatgagtaatgcagcaattatgaatctcaccgataaacacgacgtccggctgcgccaacgcagcaaccagttcgtcatatccaatctccttgccgttcgcatcaaacaaggtatacgctttcttatagcctttttgggcaaaggctgtcactcctaccaaacataggagtaacaacacacatacttttttagaaaatagtttattcattgtatttctgatgttttccaatatataataatacaaacttgtcagggttcaccaattccttgaatgctttccgaatatccgtggtggaaatagaagacaggcatttttcgtactgttcaaagtcgtctatcgtctctccgttcttcagcaaattcaccagattggtacgccattccgcagacgcctcgtttgaaaggaccttttgttttgtcagcaggaacgattttttcattgcatccagttcctcttccgacactttatgagtacggagttcatgaatgatttcttttatcaatccttccacttttttcgtattgccccaatcaacggaagcggacaaatcaaaataaaacacctgctgcggcagtccattataaaacaaagaagcatacggagaataaacgatattttcccgttcgcgcaatatactcaacacacggttctgcaaaatatcacgcatcagcttcagtgtaagactattcctcaaagagggttggtaattgccacagaatacataatcgaatatagtctgcgtatcattttcattcgggaatgcttcgacatacgtttttccgggcaacttgaatggtttgtcagaaaaggacaatcccgtctctactttttccatacgggcaaaagtaccggtcagcaacttcttaatgctgtccgtatcaaacttaccggtcacaacgaacaccgtttgcgagggattggcatataaagaacggtaataggcagcaatcttatccagattaagcgactctaaatctttctttgtcaacgccgggcgagaaactatattccccatcagcgaatccagacgattcgtcaacgcacggtctgaagcacgtttcatcatctgctcaagtaccgtttcctttcccaaacgttctatctcgtcctgccggatttcatcgaagtctttgtaacaaagttccggacgataaatcttctcatacatcaggttaaacaattcttgcgctttgtcggcaggtgccattcccattatatcatgccagaagttactgatggcaaggttcatggatatttcttcttgttgcatataagaagacagggtatcataaggcacacatgctattcctcccatttccatatagccacctgttccttcgtaaagcggataatcctcatccgacaaatctccaacgcctcccctaccgaaagcggtcacaaagagagactgattctcatcatccgtaggacggagcagaaagcgcaggccgttcttcaaaaagacttccgtcaaattcatctccggatatttcttctcactgacaatatcagaagcatcaaacatgtggcttttggtcagacatacaggtgccgttatcgtctcttccttcacctctttgggtacgtagacaaactctttcaacggactccggattcctttttcccatgcacgtagtatgtcttctttctgaatagagttctgtttacccgtattattgcgataggcaaccagcaaagcctgctctttgtaggaaagccattcctgcaatagtttctgcaaagtagcactgtcagtcgaccggatcttttcaagcaattggcgcatctccttctccgattgtatatagcggtcaccggatataacgtaatctataaaatcatcacaccacttgccggacaactgtgcggaacagtccaccttcaatgttctggaaagttctttgatagcatcatccagctcttccagcgtaaagccgttcttcaagatacattccagctcgttagacaaatcggatacttgctgcaaaagaccggatttatccgttccggagaaagtaaacacaaaatgattcttatcggaaagaaaccaggcatcggatacattactacgaatctgccgagcttgcaaacggttagtaatagcccgtaccaacaaagaaccaagctctttacggtagatagttccaactgtatttcccactacgcaaggatgagggataatcagctccagttcagaactgcgtttgagatcatctcctatctcatgaagagctattcctttttcataagtgagaggataaacacgataccctttcaccttcttacggggaatggaagcgaacatttctttgatcttcttctctatggaaaccggatctacatcccctaccaccacaacagtggccatttgtggagagtaccattgctgataaaactcaatcagtgttttacggtcaatgctacggatatcctccgaactgcccaacggcatacggtcggtaaaacggtttttaccgatcttcaaactataaaagtcatctcctatgtcatagccgcgcaactcttccaaaatcactccgcgttctttcttcgtccgttcttcctcaaaggagagtccgtccaaccaatctttcagtatcaacagaactttatcacttacggcagaatcagttttatccatcggcactgtcagcatgaaaatagtacggtcatagccggtcacagcattgatatcccgcccaaacttcattcctagactttccaaatagtccaccatgccgcgtccgggaaagtgtttgctaccggcaaaagacatgtgttccaaaaaatgggcagctcccttttgcttatccgtctcctgtgctgagccgagccgcatcaccagacgaaactccgtcgtatgagccggtgtcccgttcgggagaatcagataatgcaaaccattcggtaatacaccttcaacggtgttgggaggtaaaccgatcttcttctctgaaacggattgttgcgcaagcatatctacagatattactcctaaaagaaatgctaagactagaatagcttttgttttaatttgttgtagcataaattaattataagtctgttatttatttaaggtataagttacatagatctgggtgtaaccacctgaattataatgatcccatgaaaattggaaagtaaatgtatcctcgttaaaagagcctttcggttcaataaaatcggaaggttcattttcccatccatcttcatcaatagttgatataaccaagtaaatacgaggttctaatgtagtacccatttcaattaaatcagatacattgtactctgtatatattggatttccactatccccttctccatccgggacagctactttctcaccattatcagctttttgtttccaacggttccatgccgtaaaagaatacttaaaaggaactgaagttatcgattcatcatagttatttaacactgttcccaaaaatgaaatagagcgttcttccaataataattccaaattatcaagtgtcacctcaaactcttctttatcacgatcaaactcaatagcagtcaacatacattgattccattcattaatagcccaactttcctcctctattgtttctttttgtaatatttcccataagaatgaggtcagtcccatcggattatcaatcatcttcaatatcggtcgttcagcagtagcattatcacttaacgtaatcacactcttaccttcaaaagaacgggtttcttcatcatagaatgttccaatatcgccttccggataacgtatttccacattacatttcagcactccaataaactgattcaagtctaaaccatatttttctttataccctttaataagttcaagttgctcttcagtcaaagtaggtgattccacacttggcttcacaatcagttttaaatctctccaagcttgcatacgaggatcagtataatcctttaccttcaaagtcattgaccgttgagcttttattaatcctttatgattggaagctatcttaaagctcgcctttttttcgccagccttaatcagcacactcccatcgttctccatattcaaaactccatcctcattgcccgacaattcaaaatgaattgtagcgtccgtttctacagcagtagccaaaagcacatctacagtaacaggacgatcatcattttccgctatggcagggtcatccgccgtactgatctgtatataattacttcctttgtaagtataatcaatatcgttactacaacttgtcactaatcccaacaagaaaaggacgtataaacacagataataatagttatatctcataatcttccttttttattgaatcaattttacctattcaaaggccatccttcattctgagttatattctcattatatttatattccgaacgaggaatgggaaaacaccagcgataatcatccacctttattttggtatcttctctatctccccactgcgacaatcgggacaaacctcccgagtgcaaacgcttcaaatcgaagtagagcacgccctcaccggcaaattccttttgtttttctttatgaatagcctctatcaaatccgttcctgtcaaatcatcctccataggagtagcttggcaagcctccagatattcattcatcttttcaatcgccttgccttcttgcccggtctgccgactataagcctcagcagcaataaagtaagcaccggcatagcgcatcacgttgatatactgtatacttttggattccttattccatttattatatttccccatcagatttcgggactctccatccatctcgaaaggatatacattataagcttgacgtatatcatcgtctccataagtgatagcgggattcaatgcaaagtaatcaccgttcgtcgcatcaaactgaatacctgcataaaaactcttcgatgtataaaaagcgaatatacgctctttgcaggaagccgtttcccaaagtcttccgtaaccattctccgtgaacatatcatccgtcgctttttccagcaccttctccgcataagttacggcttgcccatactgtccggcatacagttccaactcagccaacagataataaaccgcagtctgagacagccagccgttcttatccggattattctcgaccgcagcagcttctgtcagtaatgtacggatagtagtcgtacaggtttcgatggaagaacgtttcggaaaagcaagtcccagttcatccttcaatacaatcccgtccgcttgcggattcttgtcataggcaggagcaaacagtctcaacagattgaaatagcaaagcgcctttaatgctttcgcctcactaatgatagccgctttatccttctcctccgaagcattctccagcgttatgttatccacgcgttccaataaagcgttgcaggaggcgatcgtgttataatactctccccacaaactttcggcaagagtcgttatagaattatcctgccaagcataaaggttcttcaggctcatatcttttcccacaatggaagtcgggcaaaaatcatcgcccaaaatagaaagttcatattcgtaatgtggatacaaactataaacagaagacaaaagagagcgtgccgttgaaatatccacaatagcatccggatccgaatactgatcggaagggggaatgtccaatgaacaagaagacaatcccgacagactccccaccatgacggcacatatataaatgagtttctttatcataatcgttatcctttaaaaagtcagattcatattgaatgtataaataggctgcatacttcctgcaagtgtaccgctttccgggtcggactctttgtatgaagtccaggtaaacagattggaaccttgaaaagcaaaagtagcatacttcacgaacggtatcgttttccgcaagaaacgttggtctacacgatatcgcagagaaatcatagagagtttcaggtaatcactctttcccacagtcaaggagttgggatacaaagtaaggttctcttccgcagtagctgaagtataaaaaggagtaggatatactttcccttcatcaccggctttgaaccacattctttccgtctgtcctgccacagcgttccggttcacattatccttatcacgcacatacgaataattgaattgatgaatgccgccgtgtacataatagaaatccacatccaagtcgaaggctttgtaagaaagagagaggccgaagcttccggtatacggtggtgtagaatgccccaaagctaccacatcatccactgtcaatgtttcactcgcctgcttctccttattatctttcaccagaaataccggataaccggtcaaaggattaatgcctaaagactgaggaccatagatcatatcgtatgacttgcccacttcataatccggaaccaatacatcctcagatgcatatatcttgtctgcataatacaagtcaattaccttgttacgattgtacgccatattccatctcaaattcaaaatccaatctcttgtatccaggactttcgctttcagtccgaattcgattccccggttttccaatataccgatattgcgcttcaatgtggtataaccggtggaagaaggaataggcacatcaagcaacgcttgttccgtgcggcgattgtaccagcttgtctccaaagtcacccgattgaacaactcaatactgactcccgcatcaatggatttcgtctgttccggtttcaagtccttattataaagtcccatcaactccagaacacgctgatcctcatatgcattattggaataggcgaaagtagctaccgtagaggaaacggaaacaccgttcagattggctgtatatccgtaagacgctttcagattcaagcgggtcaggacagtattgtctgccagaaaagagtaatagctgggagtccaaccgataccgactgcccaagcgctattccaacgcttgtccgaaggcaggatagaagacgcgtccgctttataagtcgcatagaaatcgtaaatattatcaaaggtataacctaatacagctcccaatcccaactgcgcatttttatctttcagagcgccgacttccgcctgacgggttccctgaatggagtgattgatggcagcagccgaattaatcgttcccacgccataaccggttatggacacattatccaactgagtgaggtagtagtccatattagctcccaacgtaaggtcatgcctaccggcaaatacatgattataagtcgcacgaatgttagtagaaatgttcgtggtcgtattctttgattttgcgaaaataccccgtttaagttccggaataccacttgtcatttccgaataagaagtagagggggtaaactgttccgtttcatccaacagaaagtccaatcccgccactgcggcaatatccagtccgggcaagggattcaaggtcaggctaccactgatcccggcagttttcgccgcactctcctggctgaactgattcatcaagtccttataagtacgtcccggataagaaatcagttcgccaccgtctttcgtttcataaggattcaactcataaaccaactgggtcggatcggaagtagatccgttcggggtattcgtcttcgcatatccaccgttcacactcagcaaagcgtaaccgatatgtcccagtttctgatccagattcatacgcaaactcatacgctgcttgtcattacccggcaaacgtcctccttgcttggtataattggcagatatataataggtagtctgttcgcttccgccccgaatgcttacattatgtttctgatacagattgttacgaatcaactctttgaaccaatctgtattgatattcctcaattcgttcaacttctgttcccccgacgcaatcagttgcgacaagttaggatcgcccgcatagtatttattgtagtaatcagcactgtaacgatatcccggagtctccggattctgcagcaaccgttccagttccagtttctccgctgagtccatcatagacacgccgcgacgaccgcgcgtcgtgactcccatgtccaacgtataagtaaccattgtctgcccgctgacacctcgctgggaagtgatttccaataccccgttggcagccttgattccatacaaggcacaggcagccgcatccttcagcacctttatttccttgatatccatcgggtttagattgtagaaagtttccggactgatgaccttaccgtccataatatacaacggttcattcgttgtattccctttacgtaaagaagagtttccacgaatacggatttcaggggtcgaacccagttccccggtattttggataatcaatccgggaacagaaccttgcaatgccagccccatatcgatcatcggcttactattgatgcgtcgcatatccacctcttgcaccactccggagcgggcacgaatatcaatctcattaatattagctttggctgtgacaacaacctcatccatattattcacatcatcaagcaaagtcacatccagccgtgtttgtcctttataggtaactactttccgcttcataccgataaaggaaaactcaatactcacaccgggctcccactgtcccttcaacacatactctcccttttcattggaaatagctccataaggcgtattttttaccttaatattaactcccgctaacggaagatcctgcgaatcgcgcacatgaccagaaattcgtttttcttctctttgtgcttgcacaatgacacaaaatgagaggaaagctaaaaacagtatccgtctctttaaatagtagttcatacattttgtcttttaactatatggcgtaaaagaacaaagaaaagctaataaagacaaataatgcctacggaaattaaactattttaagaattatacctattaataggtagagcggaactgcccatctgttttacttttaactacttcccctcttttgctttgaatgccaacgcatacatccgtatttgttttaccatcgacagcaaaccgttgctacgggtaggtgacaaatgttccttcaacccgattttatctataaaataaagatcggcattcaatatttcatcaggagtatgatccgacaataccttaatcagcaaagctataattccttttacaatcaaagcgtcactttccgccttaaatacaatcttgccgtctacatcgtccgcctgaagccatacccggctctgacaaccttcaatcagattctgttctgttttatatttttcatccagcggttcctgctcatttcccaaatcaataagtagctggtagcggtccatccaatcatcgaagtcactgaactctgcaattacttcgtcttgtaattcattaattgacatactatttattttatttctcgttatagattacctccaatacagtctgaccgactgctttcaatgtattcttatcaatgtgatccatattatccgtgagggtatgccaggtaggagtaaatccaccttccggatcagaagcaatgatatcaattgtctttatacgcgccaaccggttaatgaacaaatgatcgtccgtcacccctcctccatcttcattgataaacagattgccgtatcccagcttccgggcagccttccaaaccttcttattaacgtccggcgcaaacttctcggaataggattctttcagaaagaccgtattcttacctcctaccatatcaagcagaattccgaaacgggcattgtatccttgaacatgaggattgcgcgcccaatactgtgctcccagacaccacgactcttcgttatcctgatcgtgcgctccataatcttccgcatcaagaaagatgatgtcgattccaagctccggttgctgttgatgaaccagacgggcaatctccagcaaagctcccaccccgcttgctccgtcattagcaccgagaataggtgttttatgattctttttgtcaggatcattgtcggcccatgggcgtgtgtcccaatgtgcgaacaaagcgattcttttcttactttccggcttataggagccaatgatgtttctagccttcagcaaagtaccgtcataagctatcaaatctgcatactgatcggtcacctgtgcgccaaactccttcaattgctgcgccagatagtttccacaagctacatgcccctttgtgttggggacacgaggtccgaagtccacttgattctttacgtacaaataagcgctgtccgcatcaaactgaggtacattcaccactatcttttcgctttgttcattagttgtattcgctttgttgccccctccgcacgaaaatgcagacagtagcagaaaagcagtcgtcagtaacatcatagatttctttttcattatcctcttatctattaaggtctcaaaattagttattttcatcagagtatcaccctgatggaatagattattaacatataaactttaattccacatttttctttccaacggtgaactccactctggctccattgataagcggcagattgtgcgcgacatgtcccaccggaaaattaaaacaaacgggataatcatactctttcaccaaatccgccaaagccgcatacagttccttgcccagcgaacggtcttcttcatattccgtaaactgtccgatgatgagcccggacaatttttcgagcacaccacccaatttcaagttatacatcatacgctcaatggcatgaggacgttcgctcacatcttctataaagagcactgttcccgctgccggaatatcgtatggagtaccgcgcaagccataagccaccgccatatttccgccccgcaaaataccttccgcactgcccttcctgttcaacttatgcttctcacaagtataaacaggaagattgcccgacaatatatccttcaaataaagcgaacacagatcatcctccggctccaccgtaagatggcgcgccatcaatgaatgcaacgaagcataaccgtttttctggaacaggttatgcagagcggtaatatcactgaaaccaagcagccatttcggatgttcgcggaaagcggtaaaatcaagtttgtcaatcagatgaaccgctccatacccgccccggctgcaaaggatggcttttactttcggatcgtccattgcatcctgcaaatcatccaagcgttgtttgactgttccggcaaaccggccggaagagccaccggcatgttttcccatagcgaccttcaagccccatgactccaaccgtttcttcgcacctttcaagaacagcttatctatcttactggaaggtgatacgatgaccactttatcgtctttctgcaaaaagggaggaaattgaatatccatacttaataatctatttatgattcggtagatttgctcatgcaaaaatacacgaaaaaacgattctaagcgcatctacccgacaaaacaaacaaaatatagcaaaatgttacatcacaagcgcaacttttcggtttggaatcgttattttttcaatgatttttcagatatttgctaaaaatctaacgttatggaacctattcgaaatttcgctcaactgacagcccatcttaaagtactgaaccgcagaaaacgtatcgccgtagtctgtgccaacgaccccaatacggagtacgccatttcccgcgctttggaagagggcattgcggagtttctcatgatcggagattcagccattctggagaaatatcccacactcaagcaatatcccgaatatgtgaaaacccttcatatagaggaccccgacgaagcggcgcgtgaagcggtgcgtatcgtccgcgaagggggagccgatatcctgatgaaagggattatcaatacggacaatctgttgcacgccatcctcgacaaggagaaaggcttgctccctaaaggaaaaatcctgactcatcttgccgtcatggagataccgacgtacgataagctgcttttcttctcggatgcagccgtcattccgcgtcctacattgcagcaacgcattgaaatgatctggtatgccatctgcacctgccgtcatttcgggatcgaacaaccgcgcatctcattaatacactgcaccgaaaaggtcagtgccaaattccctcattcattggattatgtgaatatcgtagagcttgccgaagccggcgagttcggcaatgtaattattgacggaccattggacgtgcgtacttcctgcgaacaggcaagcggggatatcaaaggaatcgtctcccccatcaacggacaggcagatgtactgattttcccgaatatcgaatcggggaatgctttttacaagtccgtttccctcttcgccaaagcagagatggcgggattgttgcaaggacctatctgtccggtggttcttccttcgcgcagtgactccggattgtccaaatattacagtatcgctatggcatgcctgcaagtgtcgggagactgtgaatgcaggaagcagggcactcaagttgcaagttcatccatctaaatcacacttaagcctcacgatctatgaagattctagttatcaaccccggctccacgtccaccaaaatagccgtttatgagaatgaaacgccattgctaatccgcaacataaaacatacgacagaagagttagccgcatttccacgtattatcgatcagtttgaattccgcaagaacctggtactgaaagcgctggagtccgaaaagatacctttcgactttgatgcgatcatcggacggggaggactgttgaaaccgattcccggtggagtgtatgaggtaaacgatgtcatgttggacgatatcatccatgccatgcgcaatcacgcttgtaatttgggttgtctcatagcttccgaactcagcctcttgcttcccggttgccgggctttcatcgcggatccgggcgttgttgacgagctggaagacgttgcccgtatcacaggctctccactcatgccgaaaatcactatctggcacgcattgaaccaacgggccatcgcccgacgcttcgctaaagagcagcgcacaaaatatgaagatttagatctgattgtctgccatttaggtggagggatttccgtagccgtccaccggcacggaagagcgatagacgccaacaatgcattggacggctccgggcctttctcccccgaacgtgccggcacactgcctgccgggcagttgattgacttgtgccacagcggccggttcacgaacgacgaacttaaaaaacgtatttccggacgtgccggactggctgcccatctgggaacaaccgacatccccaccgtcatacgttccattgaagcaggtgaccatcacgccaaactgatattggatgccatgatttacaatatcgccaaagagataggagctgccgctaccgtgctctacggaaaggcggacgccattctactgacaggcggtatcgcgcattccgattatgtaatcagccgattgaaagaacgcatatcattcattgctcccgtatatgtatatcccggagaagatgaattggaagcattagccctcaatgcactcggcgcattacggggagaattgccgatacaagtatataagtaaggttgctccacacagagaataaggaattgacgcgcacaaaacagttcctttttatgcacacgggtagtcgtcaccttacaaggtgaccaatgtccccttataagaagacaaatggcactttatagaatgacaaacatcactttgcaaagtgaccacccaaacaggcaaaaacaaaatttcttaagatacgaaattaatataagaaaaacaagaaaagcgacattaaaaaccaagtaaaatcactcctttataacagccgacaaacatcccaaacaacaacaaacggaaaagcatattatcctcacagtctaaactttttttagtaaaaagtcctttctaagaaaaaaatctcatatatttgcaacgtgttaagttaataaattgattaaggtcgatttttgactgtttcgaatcgggaagtatgggggtactttccgattctcttttttagcccgattctctctccttattccctattcatcgtataaaaaaatagggatattcagtaaatgttcctctttctaaaaaatcaagagaaaagctcacgtaaagcaaagcttttctcttgattttttcgttcaactctcccagtcttctatcttttttgtagaatattgtttacatattcttgttttttccttcccacccatgcattatgtacatgtcttttttaggggaagttaaaacctctcctgtttttcctgttattttagtcagattatgctgcctttctttttttcttttcgaccttttctatcatacataccgcattggctgtatgtatcccaaagaaaatccaaagtacttccgttttcctgtttctagcttttatcctggccagtgagtaatgttgtttctgcgttccaaaacttccttccaggcgggtagctctttcgcggctgagttccgaccgtaagattctccgaagcggctcatctttggcagctctgcccttacgcttaaaggaagtacttatatgatattttgtacaaaatttccggttggcattattggcatagattgaatccgccgcaagcgccttaaccctaaccccggtcagttgttgttgcagatgaatacagtctttcaaacgtactccttcgttaaaagccttaaaggagatatgttctataaaggagattccgtctatctgtatattgttgactttggctccgaattcaacggatttggtttccttgcctctgataatggggcgaaggtaatgccggtcgatactcacgatacggttggacacttttttgcctgcaaataaattcttcccttgctcaaggactgtctgtatgaccgagaaacgtctttggtaatcagaggatagtgcaagcctgttcctgtaggatgaatgaagctgctccagctggtcaagtaacttttccaataattgaagtaaccttcgtgtaatcatacgagtctgtgatttcctgcgtttacgcagtttgctataagcaagataggcacggcgtacatcaagatacttgttacggggacgttgtatgtgcaatgtacggcaatgtttgcacagatgacgatgaagccatacaataccttcccataagagtttggcatcagtaggaaaacgcaggtgactttcataacaggtggcatcggtcatacagacatgaaggttctcaagataaggtttccaatgctcggcaagaatgaactggagggactcaacatcaaggcgattcgctagttcctgacgaattgcactaacgattttaggattggttagtggatgaagcggatcaatctggacaccacaaaacaactggtaatgaatattaccgtttaaatgctcaatcagttgtgcatcggaaaagttggtataggacttcaagaccatcaaggctattttaccttcgggagaaaaataacttttacgacccaaagcagaggacttcaaatgcatttgtcgggccagttccgagaaagggaatagagaatggagtcgacctaattcactcgttgcaaaactttgacgatattttttaagcatatcgaactcggtaaaacctaaacaaggttcgatttctgagattttttgtatctttaccatgtgtttttattttagattacccccgttttggccgtcaaaccgttttttggggggaatgcttaaagatacaaaaaaggcaactaattcgcaatgaagtagttgccttaaattttattattttaggaatatcccaaaatagcccgaaaactaagttttcggactatccttactattataaagctattcgctctttacttcttttccggtcttggcaacaaaacttttctagaaagtttgaatttaccggttttcggatcgatatcgatcaacttcacgtcaatctcatcaccttccttaattccggcttcttctacagtctcaagacgtttccaatcaatttcggagatgtgcagcaaaccgtccttgcccggcaagaattcgacaaacgcaccataaggcatgatagaacgaactttacctttatacacttcgcctacttcgggaacagcaacgatcgctttgatcatacgcattgcatcatcaatacatttcttatttgttcctgaaacctcgatgcgtcccataccatcaatttcttcgatagtaatcacagcacctgtctcttcctgcataccttgaataatcttaccgccaggaccgatcactgcaccgataaattctttaggaatcgtcattgtctcgatacgcggagcgtgttctttcagttcagcacgcggctcggcaattgtttcggtaatcttgttcaagatgtgcatacgaccttcttttgcctgattcaaagcacgttccagaatttcgtatgacagaccgtctaccttgatatccatctgagtagcagtgataccatcctttgttccggtcactttgaagtccatatctccgagatgatcctcatcaccaagtatatcggacaatacggcatatttttcttcacccggattcttaatcagtcccatagcgatacctgataccggcttcttgatcttcacacctgcatccatcaatgccaatgtaccggcacatacggttgccatagaagaagaaccgttagattcgaggatatcggaaactacacgtactacatacggatagtcagcaggaatctgtcctttcaaagcacgccaagccaggtgaccgtggccgatttcgcgacggcctacaccacgctgtgcttttgcttcacctgtagagaaaggagggaagttataatgcaacaggaaacgttcttttccgtgttccagaacatcgtcgataatcttttcgtccatcttagtacccagcgtaacagaagtcaatgactgagtctcgccacgagtaaagatagcggatccgtgaggaccgggcaagggaccaacctcacaccagatcgggcggatttcagtagtcttacggccatccaaacgcttgccttcgtcaaggatggaacggcgcattgcttctttttccacatcatgatagtaacggtcgatcagaggtcctttttcttccaactcttcttcagagaactgagccttgaactcttcacggatagcttcgaaagcgtcaaaacgctcgtgcttattgttatttcctgaagctgctacggcgtaagccttgtcatagcaagcctcacgaactgccttacgcaattcttcgtcgttcacttcgtgacaatattcacgttttaccgtcttacctaccgcttctgtcaactccatctgagccttgcaatgaatcttgatggcttcgtgagccactttcatggcttccagcaattcagcctcagacacttcctgcatttcgccttccaccatcatgatgttctcataagtagcggcaaccataaggtccatatctgctttttcgagttgttcaaaagtcgggttgataacgaactgaccgtcgatacgtgccacacgtacttcagagataggtccgttgaacggaatatcggaaacggcaagtgctgcagaagctgcaagtcctgccaatgcatccggcatatctacaccatcagccgagaagaggatgatgttcacatatacctctgcatgataattatcagggaataaaggacggagagcacggtcaacaagacggcatgtcagaatctcatagtcagaagctctaccttctcgcttggtgaaaccacccgggaaacggccgaatgccgcaaatttttctttgtactctacctgtaaaggcatgaaatctgttccgggaactgcatctttagcggcacaaacagtagctaataacatggtgttgcccatgcgtagcattacagaaccgtctgcctgttttgccaactttcccgtttcgagtgtaatggttcttccatccgccaactcgatcgtcttaacaattgggttaatcataaaaattgttttatctatactttttctttcaaaattcctgcaaagatatacatttatcgtggtaatcaggtggaaatgagataaaaagttagttgcaaaccgatttttttttcaaaattaggagaagaacacaacaaaatgctttgactaatctcgaaaagaagtatatttgcaactcgtaaataacacacgctatatgaaaaagataacttttgcagcacttgccgcacttactattacagcttgtagttccggtcctaaattccaggtaaccggggatgtatcaggagccgacggcaaaatgctttatctggaagcttccggtctggaaggtattgttccgctcgattcagtgaaattgaaaggtgaaggtacattcagctttaaacaagctcgtcccgagtctcccgaattttaccgtctgcggatagacgacaaagtaatcaacttttctgtagactctatcgaaacggttcagatcaaagctccgtatatggacttctccaccgattataccgtagaaggttcggaaaacagcaacaagataaaagaactgacgctgaaacaaatccgtctccagaaaaatgcggatgacctgttggctgcactgcgcggcaacaagataggacacgatgtctttgaggacagtctggcaacattgctcggtaaatataaagaggacgtgaaagtgaactatatcttcgcagctcccaacacggcagccgcctatttcgcactgttccagaagctgaacaattatctgatattcgatccgttgaataataaagatgacgtgaaatgttttgcagccgtagcgacgagcctcaacaacacattccccaatgccgtacgctccaagaatctttataacattgttattaaaggcatgaagaatacacgccagccgcaagcaaaagctttggagattccgcaagacaaaattgtagaaacaggaattatagatatcgcgttgcgtgacgtaaaaggaaatgtacgtaagctgaccgacttgaaaggtaaagtcgtattacttgacttctccgtgttccagtcgccagcaggtgctccccataacctgatgcttcgcgaactatataatacatacgcttcgcaaggtctggaaatttaccaggtatctctcgacgcggacgagcactattggaaaacatcggccgccaaccttccgtgggtatgcgtacgcgatggcaacggagtatattctacgaatgtagctgtatataatgtacgccaagtaccgtccatcttcctgattaatcgcaacaacgaactgaaacttcgcggcgaagatatcaaagatttagaagctgccgtcaagtcattgctctaagttgttataatttagcatatttcatttaaatatgttacatagcatcttttttcacttgacacgtatcacttaaaagtctatctttgcaaagaaataatgaaaaagagggttccaacatgactcatgttggaattcttttttgtttatatgaccataaaaacaattaaaggaggaaaacatcatggcttatatgtcagaagaaggttacaaaaaactaatggcggaacttaaagagctggaaacagtggaacgcccgaagatctctgcggcaatagccgaagccagagataaaggagacttatcggaaaatgcagaatacgatgccgccaaagaagcgcaaggtatgttggaaatgcgcatcaacaaattgaaaacggtgatcgcagatgcaaaaatcattgatgagtccaaactcaaaacagattccgtacagattttaaataaggtggaactgaagaacgtgaaaaacggtatgaaaatgacttataccattgtttctgaaagcgaagctaacttgaaggaaggcaagatttccgttaacactccgattgcacaaggactgcttggcaagaaggtaggtgaagttgcagaaattacagttccacagggcaaaattgcattggaagtagtaaacatatcattttaacaaaaaggcaagtctccgtgtgaggcttgccttattttatcaataaaaagttatggcaacaatattcagcagaatcatcgcaggcgaaatcccctgctacaaggtggcggaaaacgaaaagttttttgctttcctcgatatcaatccgttggtaaagggacatacattggtagtgcccaaacaggaagtagactatattttcgatttgagcgatgaagacctggccgcaatgcacgtatttgcaaaaaaggtagcccgtgccatcgaaaaagctttcccatgccaaaaagtgggcgaagcagttatcggactcgaagttcctcacgctcatattcatttaattcctatccaaaaggaatcggatatgttgttctcaaatccgaaattgaaattgtcggatgaagaattcaagtcgatagcacaagcaatcaactcctctctataaaacatgatgatgaaataagcaagagcgttctgtgaaggacgctctttttttgttccatgccttgaaacaaagtgttccacaccgagaaacttttatcgctccttgctttcggcaacttctaccaaataaactccgatacagataaaaataatggcaaacgtctgcgtccagctaaaacggtcttgtcccaaagcaagggaggcaatagttgccacaatcagaatcagataaccataaatagcaaccaccgttgtcttcagatatttcaaaccgacaggcaacaacatataactgatagtggtcgggaaaatcaatacgaacatcaggataaggaaaggtgtccaatggaacggcatggagaataccggagcatcaaatcccgtaatgaacgttactattatagcagatacagcagcaccggaaaaggtatagcgcaacatggttattgctccgatggcagtcaagatacgctgactaagaatcagatagacagcatataccacagagctaagaagacaaagcatatttcccgtgaaagcatcggacgccaaatcatcactttgctgagttaaaatacaaaccaatgctcctatcagaccgatagaaattcctattatttttttggtggtcgccttctccttataaaagaatatcatcatgagaaaaacccaaataggttggaggctggtaaaaatggaactggaaacaggagttgttttactcaatccggccaggtagagaaacataaagccataaagtcccaaggcccccaacaggaaaaggagccatttatctttggcggatgatttttccggaggcataaaccacccgattacccaaaaggctgctgccgcaaacgtgcaacgaagggttgctcccgtcagcggactcatccacaaaggcagaagatacttcagggcattcatatttaacccgctaaaaactttcgagacagccatgctaagattggcttccagtttcttattcttcatttttattttaattggtcgttaaacaaaaaggtatgacggcgccggtatgcccagaaaagagtgacaacagtaatcagcagattaaagataaacggaaactcttgtgattgggtatgaaatatccattggaaaaaatcgacgataaaaggataaagtaagatggcaagatagttcatcatcattacaaatgccagtgccaatgtggccttttccggcaatgcggtatgcgtagtcttatcataaagcatgggttggatgacaccatagcccaaccccacaaacagacatccgggaataatcagccattcaagcggagctatccagatgagcaacaatcccaatgccatgaacagcaagctgtatgctttggtacgttctttcaatgtagccgcaatcttatccagacagaatcccggagccataatcgccagaaagaaaagagaaatcatcaagcccgaatttccacttgagaaatgatgcttctccatcaggaaaggcagattgaatatcaccgccaatacgatataagtcgtcactccgtagaagaacatcaattctatcaaatgcttcacatggataccatatttactaccgcctgtatctatcaccgcccgttcttctttcgaacttgcactatcagcagcggcaacttccggccggtctttcttcagacgaccgatcaacagaatagaaatcagcggaagcaaatagaccagaaaaggtaaatgccaactgacttccgccagataaccggtgacggcagtcgctatcaccaacgtaaaattagtgattgctgaactaaagccgaattgttttacccggtaagttccggtaaaatacctagacaccagaccggtagacaacggaataatcagcccagccccgatacccaataaggcacttactacaatcaattgccacatcttattggaaaccagatacaacataccgctcaccgcaaagagccaaagtccgattttcaggatacggacaaagtcgactttctccgtcaacttaccacccagcagaatgaaaggaataatgagcaaggaaggaagcgaagtcaacatctggatatccaaatccgtagcttccggaaatatcttcgtaagatcgcccaatataggcgaaacggccagccccggcagagaagtcagtgccgaaacagaccagatggcaattaaagtgataagagaaatcgttcctcttcccgtctgtattttcatacgcaaattcgttaaaagtttaggtttgatgagaacaatactcatcgcataaagttcaaaacgaatctccccccttaataaacgccaaataatgtaaaagccgaaaactttcaaaacagcctgctgttgttgtgggaaattcgacggggaaaatccccatcgccctaaaccttttaaaaaacaaattaagtatgaaagatttaaatttcagaaaaggcgatgctaaaacagaagcatttggttcagacagaatgttgcaaccctctccggtagagaagatacctgatggacctactactcctgaagtcgcctatcagatggtaaaagacgaaacattcgctcagactcaaccgcgcctgaacctggctactttcgtgactacctacatggatgaatatgctaccaagctgatgaacgaagccatcaacattaactacattgacgaaactgagtatccgcgtatcgcagtgatgaacggtaaatgtatcaacatcgttgccaacctatggaattctccggaaaaagatacttggaaaaccggtgctctggctatcggctcctcagaagcttgtatgctgggtggtgtggctgcttggttgcgctggcgtaagaaaagacaggctcaaggtaaaccgtttgataaaccgaactttgttatttctacaggtttccaggttgtatgggagaaatttgcacagttgtggcagattgaaatgcgtgaagtgcctttgacacttgacaaaaccacactcgatcccgaagaagccttgaagatgtgtgatgagaatacaatttgtatcgtacctatccagggtgttacatggactggactgaacgatgacgtagaagcattggacaaagcactggatgcttacaacgccaagactggttatgacattcctatccacgtagacgctgccagcggtggttttatccttccgttcctttacccggaaacaaaatgggacttccgcctgaaatgggtgctttccatcagtgtatccggtcataagttcggtctggtatatccgggactcggttgggtggtttggaaaggcaaagaatatctgccagaagagatgtcgttcagtgtaaattatctgggtgctaacatcactcaagtaggtttgaacttctctcgcccggctgctcagattctgggacagtactaccagttcatccgtttaggattccaaggttacaaagaagtacagtacaactctttacagatcgctaaatacatccatgacgaaatagccaagatggctccgttcgtcaactactctaacgaagtggtaaacccgttgttcatctggtatctgaaaccagaatatgcaaagaacgctaaatggactttgtatgatttgcaggataaactgtctcaacacggttggatggttccggcttatacattgccttccaaactggaagattatgtagtgatgcgcgtcgttgtccgtcagggattcagccgcgatatggcagatatgttgctgggcgacatcaagaacgccatcacagaactggaaaaattggattatcctactcctacccgcatagcacaagaaaagaatcttccggtagaagctaaaatattcaaccacggcggccgtcgtaaaacagctaaaaaataaaagatctatgaataaaaaagtaacactcgctcaattgcaagaagtggtacaggaggcatacgatcaggtaaagacgaatacgggaggcaagaatgccgactatatcccttacttggccaatgtcaacaaagatctctttggaatcagtgtctgcctgctcaacggacagaccatccatgtgggggataccgactaccgcttcggaatagaatccgtatccaaagtacatacggctatcctggctctgcgtcaatatggcgctaaggaaatattggacaagatcggagctgacgcgacaggcttgcctttcaactctatcatcgccatcttgctggaaaacgaccacccgtctactccattggtaaacgccggcgccatctccgcttgcagtatggtgaaaccaataggcgactctgtcaagaaatgggacgccatcgtaggaaacataaccgacttgtgcggcagtgctcctcaactgatagacgaattgtataagtccgaatcggatactaacttcaacaaccgttccattgcttggctactgaagaactacaaccgtatctatgatgatccggatatgtctctagacctttatacgcgtcaatgttcattgggagtgaccgcattgcagctttccatcgctgccggaacaatcgccaacggcggtgtgaatccggtgaccaagaaagaagtgttcgacgccagcttgtctcccaaaatcacagccatgattgccgcggtaggtttctacgaacataccggcgactggatgtatacttccggtattcctgccaagacaggtgtaggaggtggtgtgatgggtgtgttgcccggacagttcggtatcgcagcattcgctcctcctttggatggatcgggtaactctgtaaaagcacagttggctatccagtacattatgaacaaactaggactgaatgtattcggtcagaatcatatcacgatcgtcgattaaaagactttcccgataaaaagtgaagggttactattgcgcgatagtaacctttttctattacaatctatttatcttacgatgttaattaacgaactttgaaagagattgcgggaacatctcgtacaaaatgttgttataacactgactttaaaatatttttcacttaaaaccttaacttatggcaaatattaaaaatgcagtgaagctgggggtgtttaccctcgctatcatgaacgttacggcagtagtatcattacgtggactaccggccgaggccgtatacggaatgagttcggccttttactatctttttgcagctattgtctttcttattcctacatcgctcgtcgcagcagaattggcggccatgttccaggataaacaaggcggtgtgttccggtgggtaggcgaagcctacggcaagaaactgggattcctcgccatttgggtacaatggattgaaagtacaatctggtatcccacagtactaacattcggtgccgtatccatcgccttcatcggaatgaatgacgtacatgatatgtcactggcaaacaacaagtattacacgctcgtcgtcgtacttatcatctattggctggcaacattcatttccctgaaaggtatgagctgggttggtaaagtggctaaaatcggcggtttggtcggtacgattattccggccggattgttgattatcctaggtatcatttatctcgcaacaggcggacactctaacatgaatttcgacagcagcttcttccccgactttaccaatttcgacaatgtcgttctagccgccagtatcttcttgttctatgccggtatggaaatgggcggtatccacgtgaaagatgtagataatccatccaagaactacccgaaagcagtatttatcggtgcgcttatcaccgttcttatctttgtgctaggtactttcgcacttggtgttatcatccccgcaaatgatattaacctgactcagagtttacttgtcggttttgacaactacttcaagtatatccatgcttcctggttatcaccgatcattgccatcgcccttgccttcggtgtattggcaggtgtattgacatgggttgccggtccgtcaaaaggtatctttgccgtaggtaaagccggttatatgcctccgttcttccagaaaacaaacaaactgggtgtacagaaaaacattctgttcgtgcagggtatagcagtaactgtattaagtctgttgtttgtggtaatgccttctgtacaaagtttctaccagatcctgtctcagctgacagtgattctttatcttatcatgtatctgctgatgttctccggagcaatcgcacttcgttataagatgaaaaaactgaaccgcccgttccgtatcggtaagagtggcaacggtttgatgtggttcgtcggcggactcggtttctgcggatcattgcttgcctttatccttagctttatcccgcccagccagatttctacaggtagcaacactgtatggttctccgtactgattatcggtgctatcattgtcgttgttgctccattcatcatctatgcagcaaagaaaccgtcttgggtagacccgaattccaatttcgaaccgttccattgggaagtacagcctcaaactgcgaatgtagctgccgatagtgtcagtacagtaacttccaatgcgacaacttctgatgcaacagcttccggtgctactccgtcaggaagttctaaggtttcaagcggaagtgcaacccctaataatacatctccggaaaccggaaataccaaaaaggagatacctaagtaaaaggtaaaggtatatctctgtatataaaaagtaatcccgtatcggctattcaggtagttgatacgggatatatattatctaaaaaatacaactattattctccatatcagaaattggcgaaaatttcttccaaagttattgcggtattaaaaaatatacttatctttgcacccgcaaacaagaaaggtgtcatagctcagttggtagagcaaaggactgaaaatccttgtgtccccggttcgattcctggtgacaccacttcttaagcaatcggaatgtagcgcagttggtagcgcactacgttcgggacgtaggggtcgggcgttcgagtcgcctcattccgacaatcaaaggggtagctttctgtttttcagtaagttatcccctttgttttttaaataccaacctattatatcatgaaaaacagatcttttatctttacagcagtagtagcttctcttttgtacgtcagttgtacaaagccccaaaccactctttcagagaacgaacgaccgttcaatccacctattatgggatggagttcgtggaacgcctttctggtagacatcagcgaagacattattaaacatcaggccgacctcctggtggagaaaggattgaaagatgcaggctatcagtacatcaatgtagatgacggatacttcggcaaaagggatgaaaacggagtcatgcaagcaaacgagaaacgtttccctaatggcatgaaacctgtggcagaccatatacacagtttgggaatgaaggcgggactctatacggatgcagggactagaacgtgcggctctctctggaacaaggactctataggaataggagctggtatctacggccacgaaccgcaagacgcccaattatacttcggcgactggggcttcgatttcatcaaaatagattattgcggtggagaagtgctaggactggatgagaaagaacgatatacctctatccgcaacagcatagataaagtgaataaaaatgtttccataaacatctgccgatgggcttaccccggcacttgggccaaagacgcagcaacttcctggcgtatcagcggcgatatcaatgcacattggaattcattaaaatatgtagtcgggaagaacctctacctgtctgcctatgccggaaacggacattataacgacatggatatgatggtggtcggatttcgtaacaatagcagagtaggcggaaacggtcttactccgaccgaagaggaagcccatttcggcctatggtgtatcatgagctctccgttactcatcggatgcgacttggaaaaaatgccggattcttcgctcgaattactgaaaaataaggaattaatcgcactcaaccaagatcctttgggattacaggcatacgtagcacaacatgagaacgaaggatacgtattggtgaaagatatcgagcagaaacgtggcaatgtgcgtgccgtagcattgtacaacccatccgacaccgtatgtaggttctccgttccattctcttctttggaattcggtggaaatgtgaaagtgcgtgatttagtaagacacagtgatttaggcagtttttccggtatttttgagcaaacgctccctgcccacagtgccatgttcctccgcatggaaggtgaggcacgcctggaaccgaccttgtatgaagcggaatgggcctacctgcctcttttcaatgacttaggcaaaaacaccaaaggtatccagtatgcttatgacaaagaagcctccggcaaaatgaaagttggatttcttggtggaaaaccggagaactatgccgaatggcgcgaaatatatagtgaagacggcggacgttataatatgaccatccactattcacacggaaaaggacggcagatagaggtagatgtcaacggtatcatcacaaaaatcagctctttgggagaggacgataatcacagccaaatctcaattccggtagaactgaaagctggttacaataccattcggatcggcaacagctacgattgggcaccagacatagactgcttcacattgacaaagacattataaattgcaatagcaaaataaagaaaaagtgcaaaaaaggaggagctaagatcactctccactcctcccgtcacgacaaacaactaaaattattcactatttgatgccatccaatgctcttttagcagtagcattagcggggtctatagccagaattttactccagtagtccctagacgtctccttgttcgctttcgcttcggccttcaatgccggattctcgatagccaacaaataataatagcccagatagctgtagcactcaaccaaggcagcattgtaacgaggatcatttttactttccaataaagtagccacttcctcatagaaaggtttagccaatcctaaagtagtctcggggtcaagtgcggaattggcacgcgccctccagaaattacccagatagctatccggtgctgccactgcgatagcttggaaaacagaatcggcagacgccaaagcctgtttacgctcttcgacagtgattgtcaatgaatcagattgcgtacctgctccataataaagtctgccaaactggaactgtaagtccggagtctgtttttccttatcaagagatgcataatatttccggtaagcactgatcgcctttttataatcattcttccgctcgtaagcagcagagatgtttttgtataagttcgtattggagggatccaattgaaccgccttttcatattgtatcacagcttcatcatactttttcaaatcttccagcagatgtccgtaatacatataatccaaataagaataatcggctttatcggtttcattaaagaaaatatccgcagctttcatcgcttcgtcaaaacgcttcaagtcagtataattatacattgccaggcggttgaacgcagcatggcggggattcttttgcagtcccatattggctacttcaagcgacttctcgaaatcatggttcaagaataaagcaaacgcatacttcactaaatcctcctcagtagctaccggtcccatagcaaaacgcgaataagcatccgcagctttgctgaaatcattcttcaaataataaatctcggccagcttcttgtctacaccggtgttagacggttgcaaagctttcagttgattcagcttttcgatagcaagactcgaatttgccatcttatagatatctgcaaatttcagataagccgccgcacagcgcggattaaagtaaatggcttcctcatatttttgagaagcaagaccggcattcttctgtttgagggcaatatctccctccaatacggccgcatcagccgatttgccgtttgcttttttggcaagagccgcatattgctgagcttccggtattttaccagcttccagataagcctcaccgatagccaccaacagctctatattctttttattcttgccttttatcatttgtccagcctcttcggccgcttgtgccggattcgcctgaatagtttctttcaattttgcaacacccgctttccattcggaggcaggagtttgtgcatagagcgacccaactgctataaacgctccagctaaaaacatttgtactcgtttcatgatagtctctaattttagttattattcgccattcacatggactacacgtatcggctgagtagccggaacaagtccggattttaatatgatgcgctgccccttgtcggaggtcataaaagaagtgaatccccaaggcagcccgttgcgaggatcattcagaattgcataaattggccgtgccaatggataattgccataatacaaataagcctgataaggtttatagctgtttccgggagtcgccacatcttcggcactcaccgccatcaccctgatttcctccctgaaagagagattggtagtatcactgcggtttcccaaccagttcacacctatcacacctatcgcatcaggattctgcgctacataatttatcacctgctgatttgtcctcaaagcactcacatttccttctgctaacggttttccgttgcagatcgaatccatcgcaaagcgtactgtactggagttcttattgtcgaacaccacccgaatacctttcagacgagaacccggatttacctgtttccaatctttcacttctcccgtcaagatacggcggaaatcgcgcacactcaacaatgaatccggattctcccggttcacaatcagtgccagtccatccgtagccagcttaatctcacgaggataaaacttacggctgtgaaacgaattcatttcttcctcagtcagtgtccgggttgcgattgccaaccggacactgtctttcagaagtaaattaatcgcctctacttcagtagtgtagcgaggaacaattccggccaaaggatacaaactctcaaacacatcgatttcttcctgcacaatgggttcgaaactttcatccgccgcaatagctatcaccccggacgaatacgtatccgtcggtccgtctttcgatttagaacggcaagcacttaatgccgccaacaaaacgattcctatcagccaaaattgtcttttcatcatctttttattgtaatctgaacattaccggaactgtaaacttcacacgcaccgccttaccgttctgcttgcccggaatccacttcggcatactctttaccacacgtacggcttccttatccagataaggatctacaccacgtgccacacgcacatccgaaatagtaccgtcgcgctctacgacaaactgaatgataacacgtccttgtgttccgttctcctgtgcaatggtaggatatttgatgttttttcccagataaaccatcaattcctgcattccgcccgggaaggcaggcatctgttctaccatatcgaacactttttccggttccggctcagcctgtgttactacctgcttcaagtcagcgatatccgcaccattctcttcatcattacctttcacatcggcaatggagatcgctactttagtagaagtcaactcttcctgactcttgatctcattatcctcgtgcacctcttcatccttcttgatgacgggagccgtaaacttaatagaactcttcaatgcagggggtggaggagctacgggttctacccgcttcatctcttcctgcttgatttccggttcttccaattccgacagagtagtaacctccgtcatcacttccttttgtttcggagttgccaacttgagcaacgtaggaatcgtaaacccggtcaatgcgatgaccaatacggcaaacattgccagattatgccgttttgtcgaattagcacgcatcttataggcaccatacgcctgattcttgccttcaaaaatcagttgacaccattccgaagaagtcaaatctatttttgccattttacttttctgttttaggtgttacatcatttatcggccagattctgtgacaaggcacccttctcatcgaaattcttcatcaagaattcgtctgcttcggcaatgtccgtaatcacatacttacctatattacatatctgcatctcgtccagcgcgtcaatcagattcttataagaagcgtcatccgtcgccttgataatcacggtcggcgtatcttttccgctcttaatttcggaaacctgtttccggtattcctcttctgaaatcttaaggtccagcttctgctgcttcaaagccctcactttgttcacggcagccacattcttctgaagcagtatggaacgtattccatccggagtgtaactcgtctctttcagcgaagtgtaatccttatagttcggttcaccctcgtagtaatagagcttattgtccgcccccagcagcaatgtgattgcctgcgaagccttcaccatactcttctgttgttctgttatactcttatcattactcggcatgcttatctccatcgtctgaggcttgctcagggtggtacaaagcataaagaaagtaatcagcaacatattcatatccaccatcggagtgaaatccacccgcacggcaaactttttctgtttgctctttccattttttccgccgctctcttgtacttcagcactcatactgttttcctcctttctattcttcagattctcctttgagagaagtaatcaggttgtaccggttctctctcaaatcctgaagtgagttcataacgttctttatcaccgagtatggagtagatgcatccgccttgatagctattcgcaaatcagcattggctgcacgcgcattgcgtacccatgccttaaactggttgtcggtactatcacatggaattccttcgtttttaagaatcttatcccgttgttcttcaggaagatcgaggaatctctgcatacttctgataggcactccgaaagtggaagctaacgtaaaccgcttctgctgttccggagtaaacttaattccatactcttcacccatgctctccaaaacagcctgcatatcctgctgtttgtcgaggctcataaatatctttccgctaggatctaccagaatctggagcacgtttgtctccggaatcttgatttccgatacggaagccggagtgtttacttgcaccggttctttcttcacgaatgttgaagtcaacataaagaaggtaagaagcaatacagtaacgtcactcatagcggtcatatctatgaacgtacttttctttttaatttgcgctctacccatgatttatagattttaaagggtccgcagaattagtgagtagcggcaaaagtttgcacaatagagaatccgacttcgtcgagaccgtaagtcagtttatcaattttgttagtgtaatagttgtaggaaataacagccaatgcaccggtcaagataccgaaagcagtgttaatcaaggcttcggaaataccttgtgacagagccatagagtcagcaccaccacctgcagacaaagcggcaaacgaacggatcataccgattacagtaccgagcaatcccatcaatgtacccaatgtagtgattgtggcaataatcggaagattctgttgcatcataggcatttccaatgcagtagcctcttccagctctttctggattgccaacaacttctgctccttagacaaagcagtattcttctccatttcgtcatatttacgaagagtagaagtaaccacattagctaccgaacctctctgattatcacagatttcctgcgctttcttaatatccccctcagccaatgcaactttgatattagcaacgaatttagctaaagaaccttttccgaaagcagagcggagagcaaaatagcgttcgatactcaatgcaagtacagtcaacagcaatgtctgaatgacaggcacgataataccacctttgtaaatggtacccaaaaagtttcctggcaacgggtgattgttcggatcattgttcataaagtttgacggatttcccaataggaaatgataaatacatactgccagaataaaacagcagataataacgataccggcattctttatacctacgacatgagtttttttagtagtttccataataagttttttgttaagatattaattttagttatttagaaaaaaatgtcaacagaattagacacactacgctatagacccggtaactttttagatacaaaaaagccacacagttcatacagggtatgaaaagtaaattactaattgaagtgaagggaataaatactaaataaggatacgtctcagagcgaacacataatactcgctacagataatggaataatgaggatccttatccgaataataggatttactttgatctaataccagtgagttttctctcaacaagaaaaacttattaataatgtctttcaaagagtcattaatttcaatgattctacgcagacgataattagaattcgtttcggaaacaggcttaaagcccaattctacatcagaaatggataaagactgtgtgttatcataatccacatgatgaccacctacagaagaacgatgattcgtattgtctgaagatgattcagagaactgacaagtcgattcacaactagatatgcaagtagagaaatccatagcatttccacttatgctaaaagatagcatcagcagaatacaagccaatatgaatctcggagaacttttcattatatcttagttgttatttattagtctcacctaatttggtcgcaaatatagtcattaaattgattaagtttatcatcattcacatcatttaaactataaatcttaatcatactattagaacaagtcagaaaggatattgtttccaaagaaagccatttattatcttaaaaaaaagatttatagcaatcattttcagaaatgataaaaaaacagaagccccttgattcgttgctgaatcaagggacttcttaaaaaacggcggctacctactctcccactgttacgcagtaccatcggcgtgacgaggcttaacttctctgttcggaatgggaagaggtggaaccctcgtgctataaccacctgaagaaattcaataaggttatgacatgatgaaaagtaaaacttcagtgtctggcaagctaaacgtatatatcgcgccccgtacatgtccgaaagaaagtgaacgggcaattagtaatgctcggctgtgatgttaccacctttacacctgcatcctatcaacgtcatcgtctttgacgaccctaagaaatctaatcttgtggctggcttcgtacttagatgctttcagcacttatccaatcccgacttagatacccagcaatgcacctggcggcacaactggtaaaccagaggtcagtccaacacggtcctctcgtactagtgtcagagccacgcaaatttcatacgcccacgatagatagagaccgaactgtctcacgacgttctgaacccagctcgcgtgccactttaatgggcgaacagcccaacccttgggaccttctccagccccaggatgtgacgagccgacatcgaggtgccaaacccctccgtcgatatgagctcttgggagggatcagcctgttatccccggagtaccttttatcctttgagcgatgtcccttccatgcggaaacaccggatcactatgctctagtttcctacctgatcgacttgtatgtctcccagtcaagcgcccttatgccattacactctacggacggttaccaatcgtcctgagggcacctttagaagcctccgttacacttttggaggcgaccaccccagtcaaactacccaccaaacagtgtccccgtaccacgggttagaactcaaataatcaaagggccgtatttcaacagcgactccacaaatactggcgtacctgcttcaaagtctccggcctatcctacacatcaattacccaaattcaatgttaagctatagtaaaggttcacggggtcttttcgtcccatcgcgggtaatcggcatcttcaccgatactacaatttcactgagctcacggttgagacagtgtccagatcattacaccattcgtgcaggtcggaacttacccgacaaggaatttcgctaccttaggaccgttatagttacggccgccgtttactggggcttcaattcaatgcttctcttgcgatgacatctcctcttaaccttccagcaccgggcaggtgtcaggctgtatacgtaatctttcaatttagcacagccctgtgtttttgttaaacagttgcctggacctattctctgcgcccaactctcgttgggaccctttatcccgaagttacagggtcaatttgcctagttccttaaccgtgaatcactcaagcgccttagtatattcaacccgactacgtgtgtccgtttgcggtacgggtaccttaaagattaagtttagcggattttcttgggagtatgcttacacgcactattaccttattccgaagaatttggtatactatcaggttcgactctctttgtggatttgcctgcaaagatcaacatctacacccttcaacggactattccgtcagtccgcggcgctgtcacgactccgtctccacgtcactccttaaggtagtacaggaatattaacctgttctgccatcggcatcaccgttcggctgagccttaggacccgactaaccctgatccgattagcgttgatcaggaaaccttagtctttcggcgagggggtttctcaccccctttatcgttacttatacctacatttgcttttccacacgctccagcaaagctcacgcttcaccttcgacgcagagtggaatgctcccctaccgatgtttacacatcccatagcttcggtaaattgcttaatgcccgattattatccacgccaaactcctcgactagtgagctgttacgcactctttaaatgaatggctgcttccaagccaacatcctagctgtcttagcaatctgacttcgttagttcaacttagcaattatttcgggaccttagctgatggtccggattcttctcctttaggacatggaccttagcacccatgccctcactcccgggatagaactactgcgcattcggagtttatcaagacttgataggcggtgaagccctcgcatcttatcagtcgctctacctcacagtagtaattcccgaggctgcacctaaatgcatttcggggagtacgagctatctccaagtttgattagcctttcacccccaccctcagttcatccggaagcttttcaacgcttatcggttcggtcctccagttagtgttacctaaccttcaacctgaccaagggtagatcacttggtttcgcgtctactccttccgactagtcgccctattaagactcgctttcgcttcggctacacatttttaaatgcttaaccttgccggaaaaagtaactcgtaggttcattatgcaaaaggcacgccgtcacttcttacgaagctccgaccgcttgtaggcgcacggtttcagggactatttcactcttctgttcgaagtgcttttcacctttccttcacagtactggttcgctatcggtctctcgggagtatttagccttaccggatggtcccggctgattcacgcaagatttctcgtgtcccgcgctactcaggataccactacgcttcgtttagcttcgaataccggactatcaccgtctatggtcccattttccaaagggttcttctcactaaatttcttgcgacatcgtggtcctacaaccccaatattgccgtaacaacattggtttgggctaatccccgttcgctcgccactacttggggaatcattattattttcttttcctgcaggtactaagatgtttcagttccctgcgttagcctcttgccatgcaagatgtcattccttcagaatgacgggttgtcccattcggaaatcttcggatcaaaggttatttgcacctacccgaagcttatcgcagcttatcacgtccttcatcgcctccgagagccaaggcatccgccatgcgcccttgattactttctttcaaactgacttccaggcatatttaactattgctagtctgtataccggaaacgtacggttcgatatatacttttagctcttactaaaattttactttttgtatcatcatgtcaaagatcgtttctcttttcagagatcgtggagaataacggattcgaaccgttgaccctctgcgtgcaaggcagatgctctagccagctgagctaatcccccaagaggttattcaagaatgttgtttttagtttttagcttttggctctcactattcctccttcttgagcttggtagtcccaggcagagttgaactgccgacctctacattatcagtgtagcgctctaaccaactgagctataggactagttcaaccttgtctacctttcgtctagactcggcttcttttttctcttgtttatctctatctataatactatagaggttgatctatatctataaataaacaagtaccagtagtacaaaaaacagaacctgtaaagtctataagtgactgtcacggttgtgacacttacggcatcgctccagaaaggaggtgttccagccgcaccttccggtacggctaccttgttacgacttagccccaattaccagttttaccctaggacgctcctcgcggttacgtacttcaggtacccccggctttcatggcttgacgggcggtgtgtacaaggcccgggaacgtattcaccgcgccatggctgatgcgcgattactagcgaatccagcttcacgaagtcgggttgcagacttcgatccgaactgagagaggtttttgggattagcatcctgtcaccaggtagctgccttctgtaccccccattgtaacacgtgtgtagccccggacgtaagggccgtgctgatttgacgtcatccccaccttcctcacatcttacgacggcagtctctccagagtcctcagcatgacctgttagtaactgaagataagggttgcgctcgttatggcacttaagccgacacctcacggcacgagctgacgacaaccatgcagcaccttcacatttgccttacggctaaactgtttccagattattcaaatgcaatttaagcccgggtaaggttcctcgcgtatcatcgaattaaaccacatgttcctccgcttgtgcgggcccccgtcaattcctttgagtttcaccgttgccggcgtactccccaggtggaatacttaacgctttcgcttggccgcttaccgtatatcgcaaacagcgagtattcatcgtttactgtgtggactaccagggtatctaatcctgtttgatacccacactttcgagcatcagtgtcagttgcagtccagtgagctgccttcgcaatcggagttcttcgtgatatctaagcatttcaccgctacaccacgaattccgcccacctctactgtactcaagactgccagtatcaactgcaattttacggttgagccgcaaactttcacaactgacttaacaatccacctacgctccctttaaacccaataaatccggataacgctcggatcctccgtattaccgcggctgctggcacggagttagccgatccttattcatacggtacatacaaaaatccacacgtggaccactttattcccgtataaaagaagtttacaacccatagggcagtcatccttcacgctacttggctggttcagactcccgtccattgaccaatattcctcactgctgcctcccgtaggagtttggaccgtgtctcagttccaatgtgggggaccttcctctcagaacccctatccatcgaaggtttggtgagccgttacctcaccaactgcctaatggaacgcatccccatcgataaccgaaattctttaataggattatcatgcgataatcctatgccatccggtattaatctttctttcgaaaggctatccctgagttatcggcaggttggatacgtgttactcacccgtgcgccggtcgccatctttagtttgcaagcaaactaaaatgctgcccctcgacttgcatgtgttaagcctgtagctagcgttcatcctgagccaggatcaaactcttcattgtaaaagtatcttttcatctgttaagatgattttcttgctctgttcaggatgccgtacaatttattgactctatcttatatacctatatttattatataagcattgacggttctattttaatcttgtactacttgtattgtttatcaatatttcaaagaacttgcgcttcgttttcaaaagcgggtgcaaaggtaaggggttttattttaaccgccaaacttttcggaagtttttttttcgtttttctttttcggttcgtttctcaggctctcttagcgaaagggaaagaagggacgaaaacgataaacggaaaaccgcgcctctttgcgaatcggactgcaaatataagaactttatttattataatccaaacttttccggatcttttttgttcttaaagtaaagcggtcctacgctttgtcattaggtcaattctgcaaggctgtcctctcttggaaagcgggtgcaaaagtagacactttatacataacatccaaatatattcaactatttttttgaagtattttgaaagaaaaacgctaactagctgaatcataacgatgttgtagaacatgttttttcaacaacggaagaaaaggacaaaggaatcaagggaagggatacattattatattcatgcgtgcgtatgtgtgcgagagagggagaaaaagaaggaagcgggcagggcggatatacacagaagtttttcgcacttccctctatcacctatcaccggcaatcatgaacgtccctgttcatcggaatttaaggcatggtgacaggttgtccgaaacctatcaccgcatctgtcacctatcaccggcctatcaccggaaggcagatgatggataaaaaccataaactatagatattcagcatattaactgcataaatacaggatataaagaaccaatatataggatattaataactcacatataggatattaacaacctatgtacagggtttaatactcaatacatagcctattaatgcctgagaagacaggcagttatgactgaaaagcaagcatcaagagccgaaagagagtacaagaacagactgtttcaagttacagaaaatgttgtttcaccacaggataccagaagttcaagcaaatgaaactaaaggttcaagcaggggaaactaaaggttcaggcagaggaaactggagtttcaagagggggaaactaaagtttcatacgcaggaaacacttggtgaaaagcaggatggcaaagacagggcgtaaggataagtaagggaaagtgtaaggatgagcgagggaaaggggtaaaatacaccgcatctgcaaccatcccacaccactatcctataccctattaatatactaatattcaacaatataaagtgagaatggtgtaggatggcagatgatttgtctattcaaactcatagggaggagaatacaatgtattatttatcgaggaatactccccaaaatagctggcgaaaactgggtaccggttattaatgcaatataccatcaaaagagcaggcacactcaagcttccacaatccacttttcaatattgcgggtttccgcactgaagtttaccccgatttgaaagagtttccgtccatccgtcgcgaaaggaagggcgtaatgcttatcctttatctgtcgcaaagcctcttcagcactcccattcaatttaaattccatgatataaatgaatttatccgtctgcaagacaaggtctatgcgaccttcgctcgtatgatattccactttggtatagaagccgaccagcttaaatacaatgaaaaggacattctcataatgtaattcctggtcgcgaatcacctcgtaggtggtatcggcaaagaaactctgcaggcggcgaaagaaagaatcataatcaccggaacgtacttcacggacaaacttctgaatttcaaaaggggactccaccttattgacattcgcataataaggaagcataaaacggacaaagccctcttccacttcacggttcgggaaacccaaacggtagattccaaattcttcatcatatcccttaatggtaagatatccgctttgataaatcacaggaatgggattggtggattccgagtctatgctgttcagcacttgggcatctgtctcctcgtgtgccatacgttccaggtcataatgatgctttttcagcagactcaccagataagtaggcgtacccgtctcaaaccaataactaccgaactccttgtacttgaaagcattgagaaggctgaaaggattgtacataccaattgaattgtgtgtaaaatgatagccatcataacattctttcaattccgcacagagtttatcatacgtcacgccacgtacatcagcaaattcatgaagctcagcatctaaagtatcatgaagttcacggtcacttacaccgcaaagctcaacataatcctttcgcatcgatatatcatccagattattcaagtcactgaaaacgctgaccttaccaaatttcgtcacaccggtaagaaatgcgaacttaatacaaccgtccattgttttgagtgccccatagaatggtttcaaagcattccgaaattgtctctgtaattcttcattgccgatagcctgcaacataggcttatcatattcatctacaagaataaccacacgctgccccgcctgtttacaagcgcgttctatgataccggcaaaacgtaaggaaaaagaacgttctgacggttcagcaccgtaaagtttttcccacgcagtcagagacttatcaagtatattatccagactatccggagtgtcatatttctctatattgagatccagatgcaagatgggatatttcacccaatctttttcgagtttttctaccgccaatcctgtaaagagctccttcttaccttgaaagtacgcctctaaggtggagataagcagactttttccaaaacggcgcggacggctcaggaagtaataactacccgtctttaccatttgatacattaacgccgttttatcaatatagaaataaccatcctgacgaatcttctcaaagttctgaataccgatcggataaattttactgctcatactctcttctttattataacaaagatacctttcttacaaagataggaattttttataatattcgttcaatctcttgcagttcttcttctgcaaactccaaatgctccaatgttttcagattgtccgccaactgctttacggaacttgctcctacaatcaccgatgtcattcgttcatctttcagtacccatgccaaagccatttccgccaaagtctgtccacgacgacgggcaatctcattcaattgccgggcggcttctactttttcgggagttacttgcgaacgctggagaaaaccggaagaacgtgcagcacgggaaccttccggaatgccgtttaggtatttatctgtcaacagtccttgcgccaaaggagaaaaagcgatgaaaccggaaccatattccgccgccaaaggaagtgattcagcctccactgcacggtcgaacatactataccggtattggctgataagacagggggcaccggcttttgccatcatctcataggcgatacgggcttgttcggggggatatttagagattcctatatacagcgctttcccttgcttcacaatatcaatcaatgtccggacagtttcttctaccggagtcactccgtcataacggtgactataaaagatgtcaaaatactccaaacctgtccgacggagactttggtcaatgctcgccatcagatttttacgggaactgttgccgccataaggtcccgcccacatttcatgaccggccttggaagaaataatcatttcatcccggtagccttgaaagttctcttgcagaatcctgccgaaattggattccgcacttccgggaacaggaccgtaattgtttgccaaatcaaaatgagtgattccatgatcaaaagcaaacttaatcatgtcggtcgctacctcgaaattgtccacactgccgaaattatgccacaatcccaaagagataagaggaagttgcagaccacttttgccgcaatatttataaggcatccgttcgtaacggtcggcaacaggctgataattgagagaattttccataaggcgatatttttataggtttcaattagaactataactggaattagaactgaaaataaatgaacggttgtatttccgaactcttcatttgaataacaagataaatcaaagccaccatcaacacagctttgcctacgaacggcaggcgaatcactccccgacaaactgcattttcccagctatcgggagcaaaatgaagcaggaagccaagcagcattagcgcgaatactttccaatagccttcaagtaactgagggaacagttggggacggaaagtcgtaaatatctgccccagcatatctaccgaattctgaaaatcggcgttacggaagaatatccagcagaaacagacaaagtggaaggtaatgataatgccgaacacacgtcgccaaccgtgactttgttctcctttcctccgtccggttatcgtcatccagattttatgcatcgccagtgcaacgccgtgaaatgtgccccaaagaacaaaattccaggaagctccatgccacaaccctcccaaaaacatggtaataataaggttcagatattgccggatcttccctttccggtttccacccaaagagatgtataagtaatctttcagccaactggacaaagagatatgccaacgacgccagaattcggtgatggaggccgacttgtaaggagaattaaagttaagattgaagtggaagcccaataacagtgcgataccgatagccatatcactatatccggaaaagtcgcaataaatctgcaaggcatagccgtacactcccatcagattctcaacacccgaatagagcgtcggattatcaaaaatacgctctacgaagttaatactgatataatcggaaataatggctttcttgaacaggccggaaagaatcaggaagataccccgtccgaacatctcctgcgagacaaaaagaggtttcctgatttgcggaataaaatcacaggcacggacaataggacctgccaccaactgcgggaagaatgatacgtaaaaggcataatcgagcagactcgtcagtggctggatttctttccggtagacgtcgatggtatagctcagcgactggaacgtgaagaaagagataccgaccggcaggaatatatcaagtgccgtgaactctccccccatcagggacgcaataatacctcccaagaaattggtatatttaaagtaagccagaagtcccaagttgacacccagactcaaggtgaccaaccctttgcgtttccaatatccttcggtgcgatacatcagttgcgccaacagaaagtcgcaaaccgtaacaatggcaagcaggaaaaagtaagtaccgctacttttatagtagaaataataagaaaaaagggtgacaaacaagatacgggcggtatatttatgttgcaacaatacgtacaccaccataaaagcggcaaacagccaaagaaagataccactactgaatatcatcggtgcctgtggatcgtagataagcacctcttttaatctactgaaatctatatcaatgggaaacataatcgttgtatgctttgataagggcttggtataataaatttccttgcaggatatatccttcgggaagataatgcacatgatcgggacgcatcagcttcgcttccgtccaattcttacaggcacgttttttgccgccgactacatcatacatatcccacaccagcagacgatggtccccggcatagcggcgaatggtttccaccgcagtcgccgtgcggggattgacggcatacgtacgtctccgccttctttgacggaaactctcatacgaaccgggcggagtagtcagcaggataggcacatcatggagtgcggcacgcaggagtctgacaagttcatccatctggttgtaatgcacattactattgtaacgcctgttatgactctcattggttccgaaagaaagaatcagcaattcgggtttgagcgtcgctatctcagcgatgcggtcgggatgggtgaaagtaagacaagtggcgccgttcactcctttatctatataggaaacagcaccgaaggtttcggccagccgcataccggtggtttgaggatagatatgcccgcgaatatggctgtcgccaatatgtacgatacgcaccgtatcttcggacagtcccgcacgtacttgacggagtcgttcgagcacaggtgtcagcagggcaatactgtcgataatttcatttcgcccggtttcacagaaagcggacggaaaggaagtctgcacagggatggtatcattcgcccaaatcatttcccgcaaaggtttgacgcctttctgcaccttgttcaatggaggacaaacggggatacggtcttgcgccatcatcctcgaaagagaacaaggagcaaacaaaatgcccgccaaaacaagcacaaagaaggacaacaggctattctttctcataagcacgcctcctgtcgtattgttctttgccatacatcaatgtctcatagagaagtcccgccaaatgtttaccgccacggaagttgatatgtgtataatcatagtttgccatagacggtttggcatggacaagttttgccatactcccttctcctcccatagcctcgaacatattccagaatgcgataccgctttcggcggcaatattctgctgataacgaatcaggttcttgactcccggcatggtgcggaggtcaccgttttcgttcttgtaatcacggtcgcccacgctcaacagcaggattcccgcctgcgggaaacacgttttgagatgtccgatggctgccaacagccctttctggtagttatcgtaattgcgtccgcgttccgttgcgacattcaatccatattcaagaataatcaggtcgtaaggacgctggcggttaaactgtttcaacatttgctgcggaatgccgcgcagggaaagtccggaactgccgcgcagcgagaagttatcgagaattattccttgctttccatccatcgccaatccatagaagagcgtagagtcggcacggtccactgtccaacgtatggagccgatgcgtccgtcaacccgcacttcctgcaaaccgcccgaaggggacagcaaatagttatggctttctcctttgttcacacgggcggaaagatgaagggagtctttattgtaaaagaagatggaagcacgctgacaggtatcaagcaacgaagcgtatttgtcttgtccacgcagttccacgtatgcgccacttcggggaacgaaataatgtccggaaatcccctgcttcttcctatcgaaatagacgctgtccgtcaccgcatggctggaccatccgccaaatgtatgccgcaccgtaggacggtaaccgcttgtcatggaggtgatggtcacgaagccgacaccgcaacctccaaatcgtttttgaagcatttcgcggagatcggccgtaaagatatcagcttctataaaggaatcgccgaatacagctatacgtaccagattgtcgtcttcggaaccggaagaaaggcgattgagagcttcataaaaaggagccatgccccgatgagtggaatcactgtaatcttcaatgcaagtcattccggcacggcaggtatctacaaaaaccggttttatcacaagtggcaagggtatactgtccgaatcggcagcaacggaatccggttccggataacgaaggtcgctcaacaagtccacgcgacgcatcgtatgtccgtcgatggtaatggccggaagccaatgaagccccaataaggctgcaaagacaaccaatacaaaccacaacgaatatttcaaatagttctttattatctccataatgatctaaatcccaaacgaccgcaaagatagataaaagcagtaagaaaaagcggtgtcggaaataataattaaacgcggattaacacagattttcgcaatgattacattcaatctgcgataaatctgtgttaatccgcgcttggtcaactgaaagtagacggatatcaaatagttcgctcaatgttccatacaaacgcgcgcaaacccaattgctccgtttccagatccatcttatgcagcgtatccagcaatggatctactttgtgatcttcgactaccgtgatgatggccgagcacatactaggccaggcgtgacttccgaaatgcgggtcgcccgtcttcgaaccacgtccctgcactttctcaaggtaggtgaagccacgacatcccaaacggtcgagcaatgacatgattcgctcataataggcctggtcgaatgttatcagtactgatttcatatttctttcttgttatttcttaataatatcatttttatgctcctggaagtaagtgtccaattcgcgttggcgacgaagcttacgacgttggttcttgatgccggttcctgcaaagacacaatacaaagtaggaatcagaatcaatgtcaacacggtcgatattgtcaaaccaccgattacggcaattgccatcggactccacatctcagaaccctgaccaccaccgatagccatcgggatcataccgagaacggttgtggctgtggtcatcaataccggacgaagacggctcttaccggaagttaccacagaatttacaactgccagcccgcgttcccgacaaagggtaatgtagtcgatgagcacaataccgttcttcaccacaataccaatcagcatgatacctcccaacagactcataacactcaatgtactgcccgtaaagaagagtgccatcaagacaccgctaaaagcaaatggcagagagaacatgataatgaacggataggtgagtgactcgaactgtgcagccatcacgataaatacaagaatgactatcagaataccaagcgttcccaaatcgcggaacgaatcctgctggtcttcgaacgaaccggcaacctgaatagtcacttctcccggtatgtccatcttatcgatgatctcgttaccggcagctactacgttgcccaacggtgcaccggagattacagcagaaacggtcacgatacgttcacggtctttacgttcgatagtaggaggtgcaaaacgctcgactacccttccgacatctttcacacggacgggttgtccttgcgcattataaataaggatgttctccagactttccagacttgtacggtattccggcgcgtaacgcactttaatatcatactcgtctccgtcttcacgatatttcgaagcaaccgcaccattgatccggttacgcagatagttaccggctgtcgaaaggttcagtccatgcattgccagtttctcacggtcgaagtccacctgatattccggctgataatcgctacggctgatattcacctcactcactccgggaactgccagcaactcacgcttcaggtgggccgccacgctgtcggtcactgtcatatcatatccatacacctcaaaatcggcactggcctgagcagacatccccgtgttgctacctccaagtataacttgtgccttgctgaattccggataggctttcaaatcttcacgcatctcgtcacagacagcttccaatgtgatatcacgatcacccggatctaccagactgatattgaatgagatgatatgcgaaccgttgtcctgcatagaagcccatgtgttgtccgaatcggcctgccctacggtatagttgcagactttcataatgtctttatacttcgtcagccattgattggtcagtttctgcgaaagctcctgagctatctcttttcgtgttccgataggcaattccaactgtacggcgatacgggcattatcttgtgccgggaagaactccgtaccaatcccctttgcacacagcaagctgacaacgaagaaagcgatacatcccgtaatgactatcggacgatggcgaaccgcccaattcaacatcttgccataccaagtgtcgagtccgtccaacgttttttcaatcggagtgaagaagagcttgaacagctttgacggctttttctgcaaacgaagcaactgggaacagagcatgggggtcaatgacaaagcagcaaccgtagagataaacatgatggcacacatcatccaaccgagttgtttgaaaagtacaccggacataccactcaccatagtcaacgggaagaacacggcaatcatggtcaaggtagaagcgattacagaaattgccacctcattggttccgtgcacggctgcctgtttcggatcggaaccacgctcaatatgggttgtcacattctcaagtaccacaatcgcatcgtccaccaccataccgatagcgatggaaagtgacgaaagcgaaataatattgatcgtgtttccgctaatcgccaggtaaatgaacgaggctatcaaagaaagcggaatggtgatacagataatcaacgtcgcacgccagcgtcccaagaagaggaacacaacgatgacaacgaacagcaaggcgtagacaacggtttcggtcaaactgtcgattgtattcaggatgttgtcggaggtatcgacaatgacaccgatctttacatcgctcggcaggttcttctgaagtctcggcagcgcttcggccactttcttggagatttctaccgaattggctccagattgtttctgaacaacaatcatggcgccttgcacaccgttattataggtttcctgcgcgcgttcttctacggtatcgactatccgggccacatcacgcaagaagacgttcgctccattgtgagtacctactacgacatccgccaactgccgggaatcatcgaactctccttccactcgcaacgcgtaggtttcactaccgatatcgaagttaccgccgggaatgttcttgttctccgctccgataatggagctgatggattcgatggtcaggttgtatgcttccaacttgttagggtcgcaatatacctgaatctcacgctgcggagcaccactgatggacacggttccgactcccggaatacgcgccaaggggttaaccacacggtcgtccaatattttgtaaagcgccgactggctctcattggcctgtacggaaagcagcacgataggaatcatatccgtactgaacttgaagatgatcggattctcgacatcgtcgggaagctgcgagcttaccatgtcgagtttatcgcgcacatcattggtcagaacgtcaatatcgttaccgaactcgaactccagcgtaatcaatgacatattttcggaagaacgggaggtgatatgtttcaggttgctcaccgcattcaaagtgttctcaagcggacgagtaacgttgttttctatatccgaagcacttgcaccgggataagcggtcatcaccatgatcgtatttgtatcaatatccggatacaagtcgataggcaatttggacaaagagaaaagaccaaaaatcaccactgccaaaaagcagagggaggtcataatcggtttcttaaccgcaccttcgtataaactcatttttgtaagggattaatttgttagtgatttatttctcaactgccacttccatgccattcaccaaacgcgactgaccggcaactacaacttgagaattatcgggcacaccggatttcaattcgtattccgtacccatacgccgacctaactctaccttattataagatactttaccatctttatatacaaagacataacggtcgccggaacctgcctgcttaacaatggccagatcaggaacaaccacgttgtccgctgtgccgaagtttaatgtagcacgggcaaacattcccggacgtacacgctgatctctattatccagcttgatttctacctggaacgtgcgggtagcagcgtctatcgtagggtaaatcagactgatatttccggtgaatatttcgtcgccgtatacatccagcttcacatctacgggcgcgcctttcttcactttggtaaagtaagtttcggaaacattgataagaagtttcaccggagtgatctgctctacaaccaataccgggtttccaccactatacatatcaccgttatcatagttgcgtgcagtaaccacgccattgatagggcttagcaaagcggtattctccaacagattcttataagctgtctttttcacgtcgagctgcatcttcgaagcatcccattccgatttggaagcgccacccactttataaagttcatcgatacgcttaaactcgatttcctgattatccagttgcaatttggtttgtttcagattagccgcatccatctgcactaatttctggcctttggatacacggtcgcccacttctacaaagatctggtcgatacgcacgggagaggaaggggctatattgtttttcacttccgcttctaccgttgccgtgtaatcctgtatctgatctacgggacggacttttacatctgccagtttcacaatgggtttctcgtccgcttgtgctgccacagctgctttgtcttttccacctgtacacgagcccatgaacgctgccaacagcaaggctactaattggataccttttttcatattccttagttgtaattttttagttgtctatctttattcttttcctaacacctgatcgagatctgccttagcaaccaagtaatcgtatattgattgattgtaggtgagttgtgcctgcgtcaatgaaacttgagagctgttcagttcgagcaccgtacctttacctacgtcataacgtttctcggcaatcactaccgctttcttagcctgcatcacattttccttattgctgaccacttgctctgtgctcgcgctcatattgttacggcaactgacaatctgcatattcaactttctctccgtatcgatgcggttccaatcgagctgacgcatttgtatacgggcggattttacttttgtaaagttgcttgccttatacaaaggtatgctgatgttaaacatcaggttggaactgttactccaactgtaatcaaagaagttgatgttcggattgtacaaagattgatatttgtaggagaagctcattgaaatggtcggtataaagtttgttttcaatgacttaacattcttctccaacaacttcatgtttaagtccaactgcttcatcgtggtattgttatccaaattcacatcctcttctttcagctgttcggcaaacatggaggtctcatagttagtcagattgtcattaatcttaatctctacatcggcagtgatacccatcaaaactttgagctgcagtttagccaaagtcactgcgttggccgccgatatcaagttgggcttaatactccgcatctgcacttccgcactaatcttatcgtattcgctcactgttccctgctgatatttggcattgacaacattgtagttatcttccgccagtttataacttccttgaagtacttcgtaactgtcctgcgcaagcatcaactgataataggccttgctcacctgattcaccagatccagtttggaagcgcgggatttctctaccgcaagttcaatatccgtctttttcatcgacatagcgcgataaactcccggcacaaataaaggcaggtttatgttcaatccggcattggcagtattggttccgtcttgccccatcttgaaggacatatcattcaatttcatctcagccgctttaatggtatggtccaccgacccggatatgctggcttccggcaacagattttgccaagtttccttgctggctactttttttaaagcgatctcttctgcagccactttcattgtgggattttcatccaatgcaatttcgagagctttgtctaaagttaaggtcagtatctcctttgccccttgggtattctgcgcctttgcaaagccgaacgtgcagagtaccgcaactgccagaagcatcttctttcctgtcaattctttaattttgttcataaactggtttctaatttaatcttaattgtttgtcaatggggtacaccttactctctcggtgttccaatacgatttttacgatattcttgtataaagtcttccagaaccttcgctcctttctctgtggaaatgccacgaatataggtgaacatgatggactcatacacttctataaaaggatattcattgcagatatccgtattcaaaagtacatcaaactgttctttcactaacatattgacaatgccaaagtttacgtccgaacgaaaaattccctgttccacacccgccttaaagaaggacatcgttttctccgagtcgctgtcctgacggtctctcattaaactgtatactttcggatatttcttgatgtcttcaaaaaaacgcttgttcgtctgatggaacacttcaatgctcttctgaaacactgccaatatcacttccagtacattgtgagactgttcatatacttcctgtaaataagcctccctatcggactgtgccttcaaaatacattccttcagcagcgattctttgtccgagaagacttcataaagagtacgtttggaaatacccaatgctgctgcaatgtcgtccattgttatactcttaataccttttgaagcgaaagcttctgttgccgtcaccagaatccgttctcttagctctgcccgttgggaagcgtcttttccatgctctgccatcgtctgttttcaattttataaaaatacagttttcattttatattcgtttccaaaggaaaaacagaacaaagatacatagaaaacttagttaataaattaagttttctatgtatttatagtccatttgggaattattatcattcaatagagcaatatgaaaacaagtgttaattaggaaatatagaccaaatagggtagaaagatagaaagtataaaaactagaagtaaagttttatcgctataaaaggggaatgcattttgacacactctcaataatcagtatctctattaacgtaaaataaaagcttattattaggggttatggtttctgttgctccttcaactccaataggtatttgaatgtgtattttgcttcctgactatcctctttgagataggctttctttagttcaggagatttcttcaacaattcaaccattttgttcttatccagaaattctatctttccggtctcaccattaagttcataacaaacccgctttgtcaccagactcgaggcagcaagagcgtcccctatattcccacctaacttgacatcatcttcctccacaaaatttgcaccgacaacagatcctaaaggcatagcacaaaaatagatcttcttacctaactgaacagccggtgcataccaagctccaaaacgtaactttttatatcgcagtttacggcagttcagatataagtctcctttttcatcacgcacagcaagacaacgctttttcaaacgccgacacatggactcgtcatttccggccgttatccggtaatcagctcctcctgtcaatagtatctggttcttggaacgtctctctacacgcaacacggcaacagtatcaccgtcttgagccaacagttctttcaaattagaataaatgatattctgcgcaattaacgggaggctaatcacgctcatcaacaacaataagatacatcctttcttcattggtcttcctcctttcctgtctaaacgcatttttcgagtggaaagttatacattttagcggataaatgcaagggagaaaaagaaatatttaaatatactttgattacctttgcgaaaaagtattgagtttattatggaaaaattggaacagatcattgaaacataccggcttaccattcaaaaagctgaactggagttacgaaatgctcggaaacgtatctattatatcagccttttgcgactcgttttatttgtgggagccatagcaggaactatcattttctggccggacggctggctgtatatttccatatttgctattttacctttcattttatttatatggttggtcaaacggcacaatttctggtttcaccgaaaagatttcctgaaaaagaagattgttatcaatgaacaggagttgcgcgctattcagtatgatttctccgattttgatgggggaaaagaatatattgatccgggacatctttatacttttgatttggatattttcggagagcattctcttttccaatatataaatcgtacttcaacgcctgtcggcaaggagcatctggcagagtggttcaatgcgcatttggaaaataaggaggctattgaacaacggcaggaggctatccgtgagttatcgacagatctggagtatagacaacaaatccgtttatcagggttgctttataaaggaaaacctgcagatacctccgaaatcaaggaatgggcaaatagtccaagctattatcggaagcataggcttttacgtatgatccctgccaccgtaagcgtaatcaatctgctgtgcataagtcttacctgcctagatatccttcccgccagcattgccggaggcgtatttgcttgctttgtagtattcagttctgtcttttccaaaggaatcactaaattgcaggctacctatggcaaaaagctacaaattctctctacgtatgctgaccagattcttctcaccgagaaaaaagatatgcacagtcctgtattgcaagagttgaaagctgaacttaccagccggaatcaaacggcttctcaggcagtacgccgactttccaaactaatgaatgcactagaccagcggaataatctgttaattagtatgcttctcaatggacttatattttgggaattacgccaggttatgaaaattgaacaatggaaggaggtacacgcttcggatctaccccgctggatagagactgtcggtgaaatcgacgcctattgctctttggcaacatttgcctataatcacccggaatatatctatcctaaaatcaactcgcattctttccatatgcaagcgaaagcattgggacatcctctgatggatcgtaacaaatgtgtgcgtaacggaatagacatcgacaaacggcctttctttattattatcaccggagctaatatggctggcaaaagtacgtatctacgcactgtaggcgtaaattatcttttagcatgtatgggtgcgcctgtctgggcggatgaaatggaaatatacccggcacgccttgtcaccagtctgcgtaccagcgactcattgaccgataacgaatcttatttcttcgctgaacttaaacggctaaaattaatcatcgataaactagaagctggggaagaactctttattatccttgatgaaatcctgaaaggtacaaattctatggataaacagaaggggtcttttgctcttatcaaacaattcatgagtatgaatgctaacggtatcatcgctactcatgatctccttttaggcactttaatagaagcctttccggaaaatatccggaattattgctttgaagcagatatcacaaataatgaacttaccttctcttatcagaagagaaacggggttgcccaaaatatgaatgcatgtttcttaatgaagaaaatggggattgccgttattgacgactaatccccatcccacaacatataaaaatcaaagttttctctttatgcgattgctaactcaaataagtgtgcctataccttaaatcttgcttttggaaagaaatgcaacaacagcagacgcactttcattggtatagtactgtaccgatgttataggctgataattataaggtacaaattggaatagctgtaccgctgcaaactttttgtcctcagaaagtataatatccattcgtatgttaccgttagactcactctttatttcagaatctgcagaaaaagaaccggaattcactatgttcaccaacgaatccatatgttttaggtcaaagaatacactatgttcttttgcaacactgcctgtcggtaaataaaccacctcttttgatttccagaatagccggaaaatacccataagaaacagccctgttcctagaaccattaaagccatactgactgtcgaagatttgtcttccagtccgaaggtggaagcaaatgctataacaccgaccaccaacataacggaggatattaatacacctgaaaaactagtacgttttgcgatatcgggatgtgaagatgcaaatatagtagcatcaatagcttgagtagttgccataatatttaaagtttaatttattagtaaaaatataaaggtgataggatgaccggtagataatagttataccagtaatcttaaaagaaataatgccaataaataaactgctaaataataatacgccttagagcaaatacataatactcgctggacggttgacaataataggatatcgtagtattataaatctttcccaaatgctgggagagagaattctcatagtctgcacagcactgtaacagattctttagagtagagaaatattcgccaagttgtacacgctgaacacgagttaccgaagtctgataactttgcaaattatttaattcagccacaggagaacaaggaaactccggttcactgatctgctcatgctgactcatcgaatatgttacggcatactttccctgctccactgcttttccagtgaaaacattgcctgctaccccgtgaagagtaaccgtcaacaacagaaacaatataacctttacaaattttgccataatctcgtacaaatataacagattctatccaggtaaggttcattgaagaaatcttttaatttatcttaggattagtaacaggatcataacaaaagaggctactccgttaccggaatagcctttatattcgatatgaacaatcgttgaattattctgcagactctgctttaggttcttcagccttaggagcttcttcagttgcaggagcttcaacagcaacaggtgctgcagcctctgtgctcttcttagaacgacgagtacgagtagctttcttagcaactttttccttagccatgttttcattgtagtcaactaactcaatgaagcacatttcagcgttgtcacccaaacggttaccagtcttgataatacgagtataaccacccggacgatcagcaatcttaacagagatttctttgaacaactctgttactgcaatcttatcttgcaagttgctaaatacaacacgacgagagttcgtagtatcttctttagacttagtaatcaaaggctcaacaaactttttcaaagcttttgcctttgcaacagtcgtagtgattcttttgtgcttgatcaaagagcaagccatgttagataacatagcgcttctatgagaagcagtacgacctaaatgattgaattttttattatgtctcattttttattctttatctaatttatatttagaaatatcggttccaaacgacagattcagactttccagcaaatcatcaagctcggtaagcgatttctttccgaagtttctgaatttcaacaggtcagttttgttgaattgtaccaagtcgccaagagtttctacatcagcagccttcaagcagttgagggcacgaactgacaaatccatatcaacgagtttagttttcaacagctgacgcatatgcaatacttcttcatcaaactcttcattgccgtcagtatcattactttcaagcgtgatcttctcatctgagaataacatgaagtgataaatcagaatctttgcagcttctttcagcgcttctttcggatgtatagaaccgtcggtactaatttcaagtaccagcttttcgtagtcagtcttctgttctacacggaagttttctacagcatacttgacattacgtatcggtgtataaatagagtcgattggaattacattaacatccgtacagtactcgcgattttcatcagcaggcacataaccacgtcctttgttaattgtaatatcaatctgcatagttgacttagaatctaaatgacaaataactaattccggatttaacacttcaaatccagtcaaatacttacctatgtcacctgctttaaattcactggaattctcgacagtgatgctcactttttcgctctcgaactcttcaactacttgcttgaatctcacttgtttcagattcaagataatgttggtaacatcctcttttactccaggtacactagaaaattcatgctccacaccatcgattctgatagttgtgatagcaaaaccctctaatgaagagagaaggatacggcgtaacgcattacctacagtaataccaaaaccgggttccaacggacgaaattcgaatttaccgaatctggagtccgcctccaacattaatactttatcaggtttttgaaatgctaatatcgccatgaaattaattattatttagaatacaattcaacgatcaaatgttctttaatgttctcaggaatgtctgctctctcaggtatgtgcaacattttaccaaccttcgaagcttcatcccattccaaccaagcatatttgctatgattgaaaccagcgagagaattagcaattacttccaaagatttagatctttcacgaacaccaatcaattgtcctggttttactgcgtatgaaggaatgtttactacttcaccatctacagtaatatgtttgtgaccaaccaactgacgagcagcagcacgtgtaggagcaatacccaaacggaatactacgttgtcaagacggccttccagcaattgaaggagtacctcaccggtaatacctttcgcagtagctgccttttcaaacaaattgcggaattgtttttctaaaactccataggtgtatttagctttctgcttttcacgaagttgcacaccatattcggaagtttttctttttcttgaatttccatgctgtccgggaggataatttttctttgacaaaactttatcagctccaaagattccttcaccgaatttacgggcgattcttgattttggtccagtatatctagccatttcttttaaatatttaattgtttattcatgaacttaatttgttgcagccgcgattacagagagaaattaaatgtaatccaaaaacaaaatcaagatcattgtgtaagttaaaggtaaattaaactctacgtcttttcggaggacgacaaccattatgtggaagcggagtcacgtcaatgatttcagtaacttcgataccagcaccgtggatagttctaatagcagactcacgtccgttacctggacccttcacatatgcttttacctttcttagaccaagatcgaatgcaattttagcacaatcttgggcagccatctgcgctgcataaggagtgttctttttagaacctctaaatcccattttaccagcagatgaccaagagataatctgcccttcactatttgcaagagaaacaataatattgttgaaagatgaatgaacatgcaactgtccattagcgtctactttcacatttctctttttagctgcaactgttttttttgccatatcaacaattattatttagtagcttttttcttattagcaacggttttctttctacccttacgagtacgtgcattgttcttagtgctctgacctcttacaggcagaccaatacggtgacgtacaccacgatagcaaccaatatccattaatcgcttaatgttcaattggatttcagaacgaagatcaccttctactttatactctgcaccgataatctcacgaatcttagcagcctgatcatctgtccagtctttaaccttcagatctttatctacaccagctttatctaaaatttttgctgaactactgcgacctattccatatacataggtcaacgcaatttcacctcttttgttctgaggcaagtctacaccaactattcttatagccatatactaaattattttttttgcaaaaataacaaattatccttgacgttgtttatacttaggatttttcttgttaataacatacaaacggccattacgtctaacgatcttacattctggcgtgcgtttctttaatgatgctcttactttcatatcttattttatttatatctaaacacaattcttcctttcgataagtcgtaaggagacatttcgactctcactttatctcccggcaggatcttgatgtaatgcatccgcatcttacctgaaatatgtgcagtaatctcatgtccgttttctaattcaacacgaaacattgcatttgacaatgcttcaactataactccatcttgttctattgcagattgctttgccatattatattgctttatctcccaaaacttcttctatgaatttgaatgaagacaaaatatcagcttcaccagctccaacagctaccgtatgttcaaaatgcgcagcacatttacgatccctggtcctcacagtccacccgtcacgttccataatcacttgtcggtctcccaatgttatcatcggctctatcgctatgcaaagacctctcttcatcaaaggtccatatcctcttttaccataattaggaacttgaggatcttcgtgcatctctttaccgatgccatgacctacaaactcacgcactacaccataagagtgagactcacaatattgctgaatagcatacccgatgtctccgattctcttgccttgcactgcgttttgaataccgatatataacgcttctttagtaaccttcagcaaattacgaacttcctcgtccacctctcctacacaaaaagtataagcagaatcaccacagaaaccattcatataagttccacaatccacagacacgatatcaccatctttcagaacaatatcattcggaattccatgtactacctgatcatttacagaagtacaaagggatgcgggaaacggttctccatattgattcggaaatcctttgaaagttggagttgccccatgatctctaataaactcttcagcaactttatccaactcacgtgtagttacaccaggcttcaccagtttagcaacctctgcaagagttttaccaacaagcaggttactctgacggagcaattctatttcatcttctgttttaagaaatatcatttctaatctaaagaattaatatgccgctacaccagcgcgccctttgatacgaccggatttcaacagaccatcatagtgtctcatcaacaaatgactttcaacctgttgcagggtatcaagaacaacacctacaagaattaacaaagatgtaccgccgaagaattgagcgaatccagcttgcactccgaatataccggcaaaagcaggcataatggcaaccaaagccaagaagaaagaacccggcaaagtgatacgtgacataatatcatcgatatactctgctgtctgctttcccggtttgataccagggatgaaaccattatttctcttcatatcctcagccatctgagtcggattgattgtaattgcagtatagaaatatgtaaataatataatcattaccgcaaagacaaagttataccagaaacttgtatgatctgtaaacgcatgcaagaaaccgcctgcatcatttacatttgagaaaccgataaatgtaataggtataaacatgattgcctgagcaaagatgataggcattacacctgcagcattcactttcaaaggaatgtactgtctagcgccaccatattgcttgttacctacaattctttttgcatactgtacaggaatctttcttgtaccctgcaccaaaagaatagcggcaccaatcactaataacaagaatacgatttcaattataaacatgatcaaaccaccactcttatttgctactctggatacaacttcttgcaacaaagcatcagggaaacgagcgataataccaatcaagataataaatgaaataccattaccaatacctttatcagtaattctttcaccaagccacaaaataaacatactaccagctgccaaaataatggtagaggtaatcataaacagagtccaatctaatgaagcattcaaggaagggccagcctgcattttaagattgagcaaataagaaggggcctgaactaacaatatagcaatcgtcagataacgagtatattgattcatttttcttctgccgctctcaccttcgcgctgtaatttctggaaatacggcacagcgattcccaacaactggatcacgatagatgcagagatataaggcataattcctaatgcaaaaatagaggcattagaaaatgctcctccagagaacatatttaacaaggctaaaaggccttcacttgtttgttcgtgcaattttgccaacatcgccggattgatacccggtaatacgacgtatgacccaaaacggtaaattgccacaaacaatatggtgatgaggatccgctgtctcagatcctcaatcttccatatattctttaatgtttcaatagcttttctcattgaatcagagttttactacagttccaccagcagcctcgatagcagcagttgcagtcttagagaatgcatgagcttctacttccagcttgttagtcagagttccgttacccaatacttttactaactgatttgaagaaataaatcctgcttcgataaagtcgtttataccaacctttaccaaactcttaacttcagcgagtttttggatagtatccaagttgatagctttatattctacacgattgatattcttgaaaccaaatttaggaactcgacgttgaagaggcatctgaccaccttcaaaaccgattttcttagagtatccagatcttgatttagctcctttatgacctcttgtagaagtaccgcctaatccagaaccagcaccacgtccaattctttttcttgtcttagtagatccctctgcaggttttaaattacttaagttcatattgtaatttcgttttattattcaacaaataattacttaacaatggcaaccaagtgttttactttatctaccatcccaagaattgaaggagtgctttcgtgttcaaccacgcggttcagtttacgaagtcccagtgcatcaagagttctcttctgatcagccggagcaccaattctacttttaacttgtttaatctttatagttgacatatctcctccttatcctctaaatactttttcaacactaatacctctgttctgagcaaccattcttgcatcacgcatctcactcaaagcttcaattgtagctttaacaaggttgtgcggatttgaagaacccttagatttagccaaaacatcagtaacaccaacactttccaatacggcacgcatagcaccaccagctacaacacctgttccgtgcgacgcaggcttgatgaatacttcagcaccaccaaatctagctgattgttcgtgaggaacagtaccctttaaaataggtactcttaccagattctttttagctgactcaacacctttagcgatagcagctgttacttcacctgctttaccaagtccccaaccaatgataccttcttcgttacctacaacaacgattgcagagaaactaaaagttctaccacctttggtaactttagtaacacgattgatagcaaccaatctatctttcagttctatatcgttagtaatcttaactctattattaactcctgccataatgattaaaatttaagtccaccgttacgagcagcatcagctacttcttttactctcccatgatacaagtaaccattacggtcaaaaactacagtagttatacctgcttcctgagcttttttagcaatcatttcacccactttagcagcttgttcttttttagcgactttctcagtcaaacctaaagaagaagcggcagccaaagttttgccagaaagatcatcgataatctggacataaatttgcttgttacttctaaatacactcatacgcggacattcagtagtacctgaaattttgttgcgtactctatatttgatcttaattcgtctttctatttttgttgtcataataatctaattttatatgatttacttagcaccggctgatttaccagactttctacgaattacttcgccaacaaacttaatacctttacccttgtatggttcaggcttacggaaagaacgtattttagagcaaacttgaccaagcaactgtttgtcacacgattccaatatgataagaggattcttatttctttcagacttagtttcaacttttacctcagcaggcaattgaatgaaaatattgtgtgtataacctaaagccagttcaatgatgttaccttggttagaagcacgataacctacaccaacaagttccaactctttcttatatccttcagatacgcccacaaccatgttatgaaccaatgaacgatacaagccgtggaaagcatgtttctgcttcggattatcaagcatttccttatcgttttctgttaaagttacgtgtccgtcttcaatcgcaacattgatagcaggattcacatattggctcatttcgcctttgggtccctttacggtaaccacattatccttcagagtgactgtcactccagcagggatactaatgggtaattttcctattcttgacattctaattcctcctaattaatatacataacacaagacttcaccaccgatcttcagttctgcagcctctttgttagtcattacacctttggaagtagatattatagcaatacccaacccattaataacacgcggcatatctttgtaaccggtatacttacgcatacccggagaagatattctttctaacttcttgattgcgttaactttgttaacagaatcatacttcaaggcaactttaatagttccttgaggaccatcttctacaaacttataattaagaatgtagcctttctcaaaaagaatcttagtgatttcttttttcaaattcgaagcgggaacttcaacaactctgtgctttgcaccaatcgcgttccgcaacctcgtcaaataatctgctattggatcagtcatataaaaaataaattaaattaatcaggactaccctgacaatatttaaacaataattaccagcttgctttttttacgcctggtatcagtccgttagacgccatctcacggaattgaattctcgaaattccgaattgacgaatataacctttaggacgtccagtcagtttgcaacggttgtgcatacgaatcgggttagaattctttggcaactcttgcaatttctgtgcagcttcaaaagcatcagcaggatcaccagttcttacgatttgcttcaaagcagctcttttttcggcgtatttggctactaatttagcacgtttaacttcacgtgctttcattgattcctttgccatatctattagtcttttttagcgtttttaaaaggtaaaccgaattccttcagcaatgcataaccttcttcatctgtttccgcagaggttacaaaggtaatattcattccgagaattcttgtaatactatcgatatttatttcagggaaaatgatttgttcctgaataccaagggtatagttacctttaccatcaaacttactttcgatacctttgaagtcacgaatacgaggaagagctacacgaaccaatttttcaaggaattcgtacattctttcacgacgtaaagtcaccataacgccaatcggcatttttttacgcaacttaaagttcgcgatatctttacgagaaatggtagctacagccttttgacctgtgatagctgtcatttcattgattgcaacttcaataatcttcttgtcagcaacagccatacctaaaccctgattgataacaatcttcttaagtacgggtatctgcattgtagaagaatactggaactgtgatttcaatgcaggtgctatacgctctgcatattctttcttaagactagcagtattactcattacttaatctcctctcctgattttttagaataacgcactacagttcttttaccttccaaagaacttacttttctcccaatacgcgttgctttaccagtttttggatcaaccgggttcaagtttgaaatgtggatagaagcttcctgcttcacaataccaccctgcggattcttagcattcggctttgtgcttttagataccatattgataccttctacaaatgcacgtccttctttaacaagaaccttcaatacacgaccagttttgcccttatcttcaccagcatttacgtaaactgtatcgccttttttaatatgtaatttactcattacttaaatcttttacaaaattaaagtacctcaggcgcaagtgacacaactttcatgtttgtagcacgaagttctcttgctacaggaccgaaaatacgacttcctctaatttcacctgcattattcaacaacacgcaagcattatcatcaaaacgtatataagaaccatcaggacgacggatttctttcttcgtacgtacaatcaaagcctttgatactgcaccttttttaacatcactagaagggataacgcttttcactgaaacaacaatgacatcccccactgaagcataacgacgacctgtaccacccaaaacgcggatacacaaagcctctttcgctccactgttatcacatactgtaagtctggattctacttgtatcataattacttagctctttcaattatttctactaatctccatcttttagtcttgctcaaaggacgagtttccatgatgcttacagtatcaccgatattgcattcattcttttcatcgtgagcatggtacttcttcgttttactaacgaacttaccatatatagggtgtttttccttaaacttggcagcaactgtgatagtcttatccatcttattgctcaacacaacccctgttctttcttttcttaaatttcttgcttccatcaagctgatcatttattgttaagttctctttggcgtaactcagttttcatacgcgcaatagtcctgcgtaattgtttgatttgagcaggattttccaaaggagaaatagaatgattgataaccatttggtcataattagctgtttctgcctctactctttctactaaatcattagtagtcatttctttaatttctgcaattttcataacacttacgcattttgattttgaatatcataatcacgtcttacgacaaacttcgttgtaataggaagcttttgagcagctaagcgcaatgcttctttcgcgatttcgtaagatactccttcagcttcaataatgattctacctggagttacgggagccacaaatccctctggagcacccttacctttacccatacgtacatcggcaggctttctagtgatcggcttatccgggaatatacggatccagatctgtccttgacgttgcatatatcttgttactgcaatacgagcagcttcgatctgacggcctgtaatccacttagtctccaaagcctttatgccaaaagagccgaaggccaactggttacctctctgggcattacctttctgacggcctttctgttgtcttctgaattttgtctttttcggttgtaacatagtttcctaaaattcaaattcgtttagcgattatttttctttcttttgaagttctttccgccgttgtttccaccattgtttccacgaccactttctttgctttgtgtaaagttcggagccaattctctcttaccaaacacttcacctctacaaatccaaaccttgatacccagcaaacctactttagtcaatgcttctgcatgacagtagtcgatatcagctctgaaagtgtgcaacggagttcttccttctttatacatttcagaacgggccatttcagctccattcaaacgtcctgaaatctgaattttgataccttcagcacccatacgcatagtgtttgcgatagccatcttgatggcgcggcgataggcaattttaccttctacctggcgagcaatgttattagcaacaatcacagcatccagttccggtcttttcacttcaaagatattgatttgaatatctttgtcggtaaccttcttcaactcttccttcaacttatcaacttcctggccacctttaccaatgataatgcctgggcgagcagtacaaacagtaatagtaacgagcttcagcgtacgttcaattacgattcttgatacacttgcctttgcaagtcttgcattaagatatttacggattttgctatcttccagcaaagaatcaccgtaatcatttccaccataccagttagaatcccatcctctgataattcctaaacggttgcttattggattaactttttgtcccatctaccttaattttgatcttcgttattacttttagcaccaacgaacaatgttacgtgatttgaacgtttgcgaattctataacctctaccctgtggtgccggtctcattcttttgagtgtagctccaccatcaacaaaaatctttgttacgaacaattctccgctttcagctttacgttcgtttttctgttcccagttagcaattgcagagcgaagcaatttttccactcttgcagcagcttcttttgaagaaaatttcaaaacaccaagtgctctgttcacttccataccacgaatcatgtctgcaaccagacgcatcttacgcggagaagtaggaacattttgcaattttgcaaaatacatggtcttaagggcttcttttcttttttcagccgatattttttttcttgctcccattattattatactttattatttcaaataaatcctgttattttttcttattaccagcgtgtcctctgaatgtacgagttggagcaaattcgcccaacttgtgtcctaccatattctcggtaacataaacaggaataaatttatttccattgtgaactgcaactgtatggcctacaaaatcaggcgaaatcattgaagctctggcccaagtctttactacgactttcttacctgattcattcatggcaagaattctcttttcaagcttaacgttaatatatggacctttttttaatgaacgactcatagtttactcaattaatcagattacttttttcttctctcaataatgtacttagatgattgtttcttaggagctctagtcttaagtcccttagcatacaatcccttacgtgatcttgggtgacctccggaagcacgtccttcaccaccacccatcgggtgatcaaccgggttcattacaacgccacggttacgaggacgacgtccttgccaacgagaacgtccagctttacctgaactttccaatccatgatcagagttacctacactaccgatagtagctttacaagtgctaagaatctgtcttacttcacctgaaggcaacttaattacacagtacttaccctcacgagaagtcaactgagcaaagttaccagctgagcgaaccagagcagcaccctgtcccggacgtaattcgatattgtgaatcacagtacccaccggaatgttttgaagaggaagagcattaccaatctctggcgctgctgtttcacctgacatcagagtcgcaccaacttgcaatccattgggagcaataatatatcttttttctccatcagcataaaataacagagcgatacgagccgaacggttcggatcgtattcaattgttttaaccactgctggaacaccgtccttatttctcttgaaatcaacaattctaatcacctttctatgaccgccaccaatgtagcgcatagtcatcttaccttcgttgttacgaccgccagatgatttcttaccatatacaagagacttttctggtactgatgcagtaatttcctcgaaagtaccaataattttatgtctttgccccggtgttgtgggcttaaatttacgtactgccatttttattaaatattgctataaaaatcaatagtatctccttctttcaatgttacgattgcttttttgaaagcattcgtacgaccattgatgatacctgctttggtataacggctcttatttttgccagcatacttcacagtattcacatcaaccactgtaacattataaagagcttcaacttccttcttaatttccagtttgttagcatcaggacgcacaacaaagccgaaacgattcagcttatctgtaattgcagtcattttctctgttaccaacggtttaataataattcccattatttaagcctcctatttaaattaagatattgtcaatagctttcagagagttttctgtaagcataacaaccccagcattcaatactctgtaagtatttaatcctgagatagtctgaacattagcaccctcgatgttacgagctgacaaatatacgtttttatttgcttccggtaaaatcacaagtagctttttatcggaaactttaagattttttgtcattgcaacgaaatctttcgtctttggagcttcaaaattgaaatcttcaacgacaacgatcgcattgttttgagctttataagacaaagcggacttacgagccaatgtcttaacttttttatttaacttgaagaagtagtctcttggtttcgggccgaatacgcgagcaccaccaacaagaaccggtgaattcatatcaccacgacgtgctccaccgccacctttctgacgaccgattttacgagtagaaccactgatttcacttctttcttttgacttatgagtaccctgacgctgattagccataaactgctttacgtccaaataaatagcgtggtcgttgggctcaattccgaagatagattcgtttaacgtaacctttctcccagtgtcttcacctttaatgttatatacgttaacttccattatttctcaattaatacgattgaacctttgcaacccgggatagaacctttaaccaaaagaaggttatgatccgcgattacttttaatacctgcaagttttgtacagtgactctgtcaccaccaagctgtccacccatacgcattcctttgaatacctttgcagggtaagaacaagcaccgatagaacccggcttacgagcacggttgtgctgtccgtgagtagtctgacctacaccaccaaaaccatgtctttttactacaccctggaaacctttacctttagaagtaccaacaacgtcaacaaagttagcgtcattaaacatttctacagtaactgtatcacccagattcaattctgtttcaaattctttgaactcagccaagtgtctcttcggtgttactccagcttttttaaagtgacccatcaacggtttagttgtgtgcttttcctttttgtcttggaaacccaactgaacagcttcatagccatccttttctacagttttaacttgagtaacaacacaaggacctgcttcgataacagtgcatggtacatttttaccatcggcactgaaaacggatgtcattccgattttttttcctaataatcctggcatttcactaatttttaattatcaaactttaatttctacttccacaccactcggtaactccaacttcatcagagcatctaccgtcttagctgttgagctatagatgtcgatcaatctcttgtaagaagagagttcaaactgttcacgagactttttgtttacgaaagtcgagcggttcactgtaaagatacgcttgtgcgtaggaagaggaattggaccactaacaatagcacccgtagcctttacggttcttacaatcttctcagctgatttgtcaaccaagttgtggtcgtaagatttcaatttaattctaattttctgactcattacaattttaaatttagatagttataaataagataaagccgcaggctaagagtcattcgctagcctgctgccttagatattttagagtaaatcagcacgtcccttcacttcttccaatacagccttagcaatagaagtagaaacctgagcgtgatgagagtaaaccatagatgaagttgcacgacctgaagtgattgtacgcaacgctgttacataaccaaacatttcagctaacggaaccattgctttcacgatacgagcacctgaacggctggactccataccttcaacctggccacgacgtttgttcaaatcaccaatgacatcacccatattttcttccggagttacaacctccaacttcatgataggctccatcagcaccggacccgccttagcacatgcattcttatatgcttggatagcacaaatctcgaaagacaactggtcagagtcaaccggatggaatgaaccatcaaccaaagttactttcagtgaatccaacggataacccgccaatacaccatttttcattgcagttgtaaaacctttctgaaccgacggaataaattctttaggaatattaccaccctttacttcatcaacaaattgcaatccaccttccttgaagtcttcatcaaccggaccaatcttaacaatgatatcagcaaacttaccacgaccaccggattgtttcttataaacttcgcgaagatcaactgtttttgtaattgcttctttgtagttaacctgcggtttaccttgattacattctactttgaactcacgtttcaaacggtcgataatgatatccaagtgaagctcacccataccagagataacagtctgacctgtctgctcatcagtttttaccgtgaacgtcggatcttcctcagcaagcttagacaaaccattagacaatttatccatgtctttctgagttttaggctcaaccgcaataccgataaccggttccgggaagtccatagactcaagtacaatcggagcactttcgtcacacaatgtatcacctgtatggatatctttaaaacctacacctgcaccgatatcaccagcaccgattacttcaaccggattctgtttgtttgaatgcatctggaacagacgagaaacacgttctttctttccagagcgagagttgtaaatataagaaccagcttcgatcttacctgaatatacacggaagaaagtcaaacgaccaacatacgggtcagtagcaatcttaaacgccaaagctgatgtcttttcatcatcactcggtttacgatcttcttctgcaccagtattcggatttgtacctatcacattttcagtatccaatggagaaggcaagaaagcacaaacgtagtcaagcaaagtctgtacacctttattcttgaatgaagaaccgcaaagcattggaacaacagccatttgaacagttgcattacgaagagctctcaagacttcttcttctgtaatagtagaaggatcatcgaaatatttctccatcaaagcatcatcaaattcagctactttttcgagcattttatctctccattcgtttgcttcatcaacaaggtctgctggaatttcttctacagtatagtcagcacccattgtttcatcatgccaatagatagctttcattttgataaggtcaacaagacctttgaaagattcttcagcaccgataggaacaacaataggacaaggattagctccaagcacatccttcatctgacgaactacttcaaagaagtctgcaccagagcggtccatcttgtttacgtaggcaatacgaggtacattgtacttgtcagcctgacgccatacagtttctgactgaggttctacaccacctactgcacagtaagcagcaacagcaccatccaagatacgcaatgagcgttctacctcagcagtaaagtcaacgtgtcccggagtgtcaatcaagttaattttataagtatcacctgcatattgccaacgcgtagtcgttgctgcagatgtaatagtaataccacgttcttgctcctgctccatccagtccatagtagcagcaccatcatgtacctcaccaattttgtgagtcaatccggtatagaacaggatacgttcagaagttgttgtttttccggcatcgatgtgagccatgataccgatattacgagtcaaatgtaaatcttgcttagccatcttaattccttttactttaagttttaatgattgtatcttatagtattagaatctaaaatgagcaaatgcacggttagcttcagccattctgtgcatatcttctttacgcttgtatgcaccaccttgttcattgaaggcatccatgatttcagcagccagcttatcagccattgatttaccacctcttttacgagcaaacagaatcagattcttcattgagattgattctttacgatccggacggatttcagtaggaacttggaaagtagcaccacctacacggcgagacttaacttccacttgcggagtcacattatccaaagcctttttccagatttcgagagcagatttttcttcattaggaagtttcactttcactgtttccagagcggcataaaagatttcataagatgtattctttttaccatcatacatcaaatggtttacgaacttagaaaccttttggtcattaaacacgggatccggaaggataacgcgtttttttggttttgcttttctcatttgtttgaaaaataatgttttttgttcttggttgtctacttcttgacttcttcaactctcccaccggagaatttactcaacctttagcatctccaacaaactaaaacgtaagttattactttaattttaattaggttttaatccttattttttcttagccggtgcagcttgtcccggtttcggacgcttagcgccgtatttagaacgtctttgagtacgaccagcaacacctgctgtatcaagagttccacgtacaatgtgataacgtacacctggaaggtcttttacacgaccgccacgtaccaaaacgattgagtgttcctgcaagttgtgtccttctcccggaatgtatgagttaacctctttttggttagtcaaacgtacacgagctactttacgcattgcagagttcggcttcttcggagtagtagtatatactctcacgcaaacgccacgtctttgaggacaagaatccaaggccggagatttacttttctccaccagcacttcgcgtccttttcttactaattgctgaattgtaggcattttaattgttttttgatttatattattgttatattaatttcgtaactatacattttgggctgcaaaaatacgaataatatttgaatattcaatgcactacaacctttttttattttttaatatttttatatcagtctcacgcttcgccttttacgctcgctaaaggaggaatcgaagattcgtcagaaatacgtatcggaccaaatacccgttcatatttagcgatattatcttctaaagcccgcaacaggcgttttgcatgctcaggagctacaacaatacgagattgcactccagccttaggcatacccggcattacacgtataaaatcaagaataaattctgagcttgaatgggtaatgatagcaagattggcatatgtaccctgtgccacttcttccttcaattcaatctgcaattgaccgttattattttgttcttccatattttatatgattaatagttattctgcaaaataacgcaattttctttagatattttcatgttgagcaaacaaaaaagcggtccgacattcgaaccgcttttctattatatctgattttccaattagagcttcggacctgcagcaaccaaagccttaccagcttcgttacctgtaaacttagcaaagttcttgatgaaacgtccagccaaatcttttgctttctcttcccatttgcaagcacattcataagtatcgcgcggatcaaggattttcggatcaacacccggaagttctgtaggaacaacaaaatcgaaataaggaataaccttagtcggagctttgtcgatagaaccgtcaaggatagcatcgataataccacgagtatctttgatagagatacgtttgccggaaccattccagccagtgttaaccaagtatgctttagcaccggtcatttccattttcttaaccagttcttctgcatatttagtcgggtgcaatgacaagaaagcagcgccgaagcaggctgagaaagtcggagtaggttcagtgataccgcgttctgtaccagccaacttagctgtaaatccagacaagaagtagtattgagcctgttcaggattcaagatagataccggaggcaatacaccgaacgcatcagcagacaagaaaataacctgtttagcgtgaggacctttagatacaggtttaacgatgttttcgatgtgataaataggataagaaacacgagtattttccgttacactcttatccgtgaaatcgatcttaccattagcatcaacagttacgttttccagtaaagcgttacgcttgatagcattgtaaatatccggttcactgtctttatccaagttgataaccttagcataacaaccaccttcgtagttgaatacaccttcgttatcccatccgtgttcatcgtcaccaatcaatttacgtttcgggtcagtagacaaagtagtcttacctgtacctgacagaccgaagaaaatagcagagctagtaccttccatatctgtgttagcagaacagtgcatagaagcgataccacgaagcgggttcatgtagttcatgatagagaacatacctttcttcatttcaccaccgtaccaagtgttcaggataacttgttctttagtcttcaagttgaatactgtagcagtttctgagtttaagcccagttctttgtagttgtcaactttagccttagaagcgttgaaacatacaaaatcaggttctccgtagttagcaagctcttctgctgtcgggcgaataaacatattagtcacgaagtgagcctgccaagctacttccatgataaaacgtactttcatacgagtagcttcgttagcgccacagaaagtatcaacaacgaacaagcgcttgccagacaactgtttcacagctttagccttcaagtcagcccaagcttcttcagtacaaggtttgttgtcgtttttgtattcgtcagaagtccaccatactgaattttcagaagcttcattcttaacgaagaatttatctttaggagagcgaccggtatagatacctgtcattacattaacagcacctaattcagttacttgacctttttcaaagccttccagactcggttttgtttcttcagcgaacaaaacatcataagacgggttgtgcaggatttctgttacacctgtaataccgtacttgctcaaatctaaatttgccattttcttttgaattaattaaaattggtattttgttttattatctctttctatgatatataaatgcagaggagattggataccctcttgtaaatccgggtacaaaagtaatactttctttggaatgcaagaagggattagagaaatttttccctaattgaatctcttttataaattcctaacaatatctgcaaactgaatattgcaatttgaaagattatcgcttactttgcaaaacaaaataatgcgggatacattaaataattattcatcatgaaagtagttgattttagcaaaacaaattcgattctaaaccaatacgtctccgaaattagaaatgtagaagttcagaacgaccgcctgcgtttccgccgtaacattgagcgtatcggagaaatcatggcttatgaaatgagtaaggagtttacctactcggtaaagaacattcggacacctctcggaattgccccagtcagcactccggacgaccaattggttatcagtactattctacgtgccggtctaccttttcatcaaggcttcctaagctattttgacggagcggagaacgcatttgtttctgcttaccgtaaatataaggatacactgaaatttgatatacacatagaatatattgcttcaccacgcattgatgacaaaacactaatcatcacagatcccatgttggcaacgggtagtagcatggaactcagttatcaggcaatgctgaccaaaggtcacccagccgagattcatgtagcttccattatcgccagccaacaagccatcgaacatatcaaaaatatattccccgaagacaagactattatctggtgtgccgctattgatcctgaaatcaacgaacattcttatatcgttcccggattgggtgacgcaggcgaccttgcttacggagaaaaggaataatcctttagagacttttccgatactgttgtggcgacatccccatttgcttcttaaagaaagtaccaaaataggaggcatttgggaagccaaagtcattggatatttcctgaatatttttttgagtatttttaagcaaggagatacatttacgtataatcgccttaaaaacgagttcctgtaccgtatatccacagatacttttagatatagcagacaagtatttgggtgacagacataatttatctgcataaaattcgactccccgctcctgcatataatgctgctcgatcagttgaatcaagcggataaaggtttcacgcttacgccctcccgcatctcgtctttcaccaacaagtttacgattataaatagagcaaatccggtatgtcagtgcaagcagaagcaacttctgttcatagaacttaaatgaattctcttcaggctgcaaagcactatccaacaaagacatatatttcagaatatcttcctcctcgccggtattccacacgcaagaaggggcttcagatgtcaaccgagaatacatatacatggaaacaaccagattacccataatatcccgaataggatctatctgataaaacaacatctgtatttccaaatccctagattcttcgaggatctgaaattcaccatcttcaggaataaacaaactttcacccgccttagccaaatgtttcttctgattgagtaaaaacagaaactctccttgtccacaaacaatcacccccaaccccttcatacgaaaaggtgcttgcagcggggagggaaaagtcacaaatattcctcttgaactacatatattttttccgtttagcaaatcgcgttcaaactgcagcaaacgatctcgtccaattcccattataacaacatattaacagagtaccactaaaaacggcactaagttaacaattttcgtttaggataaggaataacaagcacaaatatcatacaaattaatccaccatagatcgtccatcccgccatttctttaagagcggaaagtgtagcctgcacctgaatacggcctttggtagatatggcggccatattacgggcttccgtctcactcttcccctgatatttcattccttgcaccgtaccgagaaaagaagcggaagcatccggattaagcaggtccacattctgtgcataacgggttacataatgttgttgccgttcttgcaatacatttgtatagagtgctcctccaatgctcggccccacaaccatacgcacggtaagcataatgcagatccatgtggaaagatatttaaagggcatacgttggttagcataggcagccgtcagcgcatacaaaatcatcatacccgtggcacggataataaccgcatatttcaaacgctcataaactcctgcggtctgcacttcaaaatacatgaatacggcagacaaagacagaaaaaagaatcccatagcaaatagatacttaaaatgcaatcctttacttcccaacgccatagcaagtacagcaccaatagcataccctaccatacaccagttacccaacgccgcattctgtaaattatcaatatgcataccgacccccgcaaacacattgacaaacattgcactggagtttatcaccatcaacaacaaataaagtaatgctcccatacgtatggtacgcagtttaaacgcatccaacaatacataaggagagcggcgcctcgcatccatataaagaaatattcccgcaaaaagaatactgacagccgtcgcccaccggatggactcatcatcataccaatcgagtactttcccatagaccaacacataagtgaggcacgtcaaagagacgcaaaacgctgtaacattgccaaatttacgaaaattaataggaaaccgtcccggaaacttataattcggcatagttataaaaagaagtaaaatagataccagcagaatccccatcataaaatagtatacatatttccactcatattcaaaggacagccaggccgtcagcgccgtacctgactgtcccagaatcataaaaaacagataaactgccggttgactcacacaccggtcaatatccagcttattccatccagaagcgtctttcggttccaaaccgggagtaatgttgcgggtagcttccataccaccggcataccaaatgagcgtaaacaaattgaccatcatcagcaccatgcgcaaaaagcctgtcaaaagactgcaaagtgccaacagaaaaacactatcagtctttgcacagatataactgaatatatacatgaatgcaaacccgacaatacacatcatcttttcccgccgcacacataccagttgataaaggaagggagcaaaagccgccatacctatcgaagttacaaagttggcaaactgtatatgttcggagataataccaagcccactcatcatttcggtactattgaccgaataaaccccacctaccgtaagaatcggcagaaagaagaacaaaagaattataatacccaacggcttgggcatccaactgtaaaaaggatagtttttaggataagagggcattgggtttaataaaaaattataaattaaaaattaaagaaggagatatagtgcgggaggaggtggtaggtaattagagtttagctttcaccactaccatcataccggcagccaatcgttcattatcctctttggacaaatcggtaaaatcaattcgcaccggaatacgctgctgaatcttcacaaagttgcctgctgaattatccgttggtactaatgaatatttggatccggtagctccggatatggaggtcaccttccctttgaattctttatcactgatcgcatctaccgtaacagatacctcttgtccaatactcagattttctatctgtgtctccttataattagccacaatccatttttgcgtattggggagaatatacgtaatagtctgtccggctgcaataaattgcccctcttctaaagaacgacgtcccagttttccatcacatggagccaccacaactgtataagaaagattcaaacgtgccatttcgagtgcagccgttgctctttggatggcagcttcagtactcacacggcgataagacacttcatccacaccggaaagagctgcctttttctgtcttttcacagcctccaacttcttacgtgtagcttcatagtccgtgacaatctgttccaactgaatgggagtagccgctttccgttccaccagattctcatatcgcttcctgtctttttccaacttcgccaaacgcacctcaatctccgcgatagacgcgtcataaacggttgctgttgtctgtgttgtattgagtgtcgcattgataaccgttgcaccggcttgcgcatctttcaaagcagcctccgcttccattacccgaatcttatattcacgatcgtcaagtaccagtaacgtatctcccttacgcacctcctgatgctcggtaaaatagattttgtcaatatagccggatgcacgcaagttgataggcgacacatattgttctatctgtgcatcgttactagtctccgtctgactataattcaggaaaagacagatcacttcaatcactccccaaacgataatagccacccccaaaaggctgactgctatctgccaccgacgaagtttcttcatcttcttcgctttctcctgatgagtagcggaaggaatattattttccattgtttccatatttatgattattatttgactaatgattcgatttgtccggtcagtttcaacaacattaggttagtgacccggtaattatagtgcgcgctaatataattattctgcgcctcactcatttgcatctcatcctgcaacacttcagtcatagaagcaattccttcacggtaacggtcggatgtgaccgtatacacatcttccgccaacaaataattatccttctgcttcttaaagttacgctgattgttcatcaagtcgttcacggcattcagatactgagtttgcagactcttccgggcattttcccatgccaacttactgttctcgatatcaatcatcgccttcttgattttatatgtcttatccagcccgtcgaagataggaatacgcaacgtcagtcccaacccgtaagagcggaaccaatggttggatgggccggagtgaaaccagtggtagcctttatccgtataagcagcatatcgccaactacccgtcaagctaagtgaaggtatataaccgttactaattatcttcttttgtttctctgccagttgcacttgtgattgtgaaagttgaagttcataaatattttccgacaaaccggtcaaagccactgtagtaatactatcggtatttaccggtgttaatacaaactccttttcagccggataatccattatatatttcaacatattcaactgctgtttcatcatagcctgcgcattgtcatattgtaccttcagattttccaaatttatattcactcttttcagatcgacttccatagacattccgttatcaaaaaaagcttgcgtaatatccctcaattcttccaaacgagtgatattagcttttatcagtactatctgttcggccgtaacctgtccgagataatacattttactgatttgcataatgatatcctccctagcctttccataagacaggcggctgatttcctccatcaccttagctatggacatagaggtatagagtgtctggttgaaaagcggcatttgcatttccaaccccgcattggcagtatgctgcaatgttttcgtaatattataagggacaccataagaagagccgtcagtaacggacacaggtggatcaaaattgttattataaccggctatcaccgttatctgtggtaataacttcgaccggttctcagatacgccatacttgcttttctgtatttctttgcgtttcccctccaacgacaagttattgtcaataccaatacgaaggcaatcctctaatgtcagggtctccacctcttgcgcttttccgtccacaacaagtaaggaaagaaaagaaaatatgaatagtagtcttctcataatatatatgctattattggctgcaaatttagcagcttatgacataataagagtatccacaaactatttgtttatattcatattttcccttttcgagcaataatctacccaaaaccggactattccggatatactgcatagaaaaacaaaacgactctcttccttccggaagagagtcgttcctatcaaactcagctactttaattattcaaaagcaaacattcacttatttcgcttcagtttttcctgtgaacttattacgtttcgtccacacaagaatcatcactccgaccaacaataaagccaacgcgacataagcgatactttccgtgacgtgtatgctctgcggattaaaccacatttcaatggtatgttcaccggcaggtacattcatggcacgcaagatataatccgcacgggcaatatctaccggctgaccatcaatcgtcgcttgccatcccggataatatacttcagagaataccacaactccgtctttaggagtagaaactttataaactaatcggttaggttcgtaatccgtcaaccggatagtagacaaagaatccttgtatccttccgtcaccccttttagctgttctttaaatctcgcatccaccacagcagtctccgtcgggcgaatatcattcaaagcgtcaatttcctcattcgcattattcacatactgcactttatccacaaaccaggcattaccatatgcatacggattctcaacaggaacaggctgtcctttctctccggctgggaaaataaagtatttcgtattcagcatattcaatacgcggaatttggaagcgtccacactatccatcctacctccggcagcagccacagcctgataagtatcctgcatttcgggcatgatatgatgatcaatcatctcttgatagcgacgcaatttcgctgcatgatagccaccgacactcttatgccagtaagcagtattgttttcattaaacgtattgctcggaaaaccgacaaaattcagtacacgataatccggagctgtatcccgaaggataatctcatccgcctgagtcttcacaaatgcttctgtccgttttgatttcgggacaaactgttcatcatacaaataacgtttattaacacaccacatatccaccaaacacaaaagtacaataccgaccagcgtgaaagaagctttcaacctcttctgcaagaataagaacagcaagaaacatcccacagctataataaagaaactgcgccatgcatccgaagcaatgatcgctttgcgcatctccgtcagatttgtcacaaccggagtaagatgttccgccggaaggccttgttgcaaagccgccatttcctgcgccgttacgaaactagaaaagaaaacactgggagcaacagccaggaccaatgagacaccagctgtcagcacaagcgatacgatcacacctgtacggttctctttcaatttcaaaatttccggtctgcccaatatttccttcaatgcaaaaatagccaataacggaatagtaaattcagcaataaccaaaatagacgatacagcacggaacttattgtacatcggaacataatctataaaaaaatccgtcagtcccatgaaattctttccccacgagagtaaaacggagaaaatagtagctcccaataatgcccatttaagcggaccttttacgatgaaacacccaaggacgaacaggaacataacaaatgcccctacatacaccggaccggcagtccacggctgatcaccaaaatattgcggaaattgcgaatagatactactatacatcggatttgccttttccatagcagcctcactctgtgacaaattatccgatgacgctcctccttttacattaggtaccaataaagtcagggtctccccaattccgtaactccagttcgtaatgtagtcacggtctaatccactgctggtctgattggcagcattcccttcctgctttaactcgctctttccacgcatagtctccttactatactcatacgtatggtacaagttagaaagattaatgcaaacgcctaccatagcagccaacgccagaattgcactagccttgaagaaatgcgtcaattctttcttcttataagcttcttcgaagtaggctcctataataaacagaatcacaaacatgaaataatagctcatctgtatgtgattagaacgaatctgaagagctataaacaaagccgtaattattcctcccaacagatacttccttcgataagccaggacaatccctgcaatcgtaggcggaatgtaagccaatgtcacaaacttccagatatgccctgccggtatcagaataaagaagtaagacgagaaagcccatattataccgccaacccccgccaaccaagccgaaattccaaatgcccgtaagagaatatagaatcccaacatcatgataaaggtcagtactacatactccggaaggtaaagttgataagtcttctccacccaagacaaagattttgttgaatcataactcggagccatctggtaggtaggcataccaccgaaaatcgagtttgtccagcggctacgttcaccagtacgttcaaaatactcttgagcatcccgtccggctccggcaccggcagcagagtcatgctgaaacagaatgcgcccttcaatatctgccggaaagaagtagacaaaagaaataacaacaaaagccaatatagcaattatgtcaggaaggagtttcttcatatacttttcaacttaaatcaatatctataatgatcagccttgtaaggtccgtctaccgatacaccgatataggcagcttgctccggagtaagtttcgtcagcttgacaccgatcttttcaaggtgcagacgagctacttcttcatccagatgtttcggcaaacgatatacattgatatcatatttattattaaacagctcaatctgagccaaagtctggttcgtaaatgaattgctcataacaaacgacggatgtccggttgcacaacccagattgacaagacgtccatcggccaacagaataatactatgcccatccgggaaataataacgatccacctgcggcttgatattcacacatttaatacccggataatgtttcaaagcatctacctggatctcattatcaaagtgaccgatattgcaaacgatagcctgatccttcattttctccatgtggtcaatacgaataatatcgatatttcctgtggtagtcacaaaaatattaccttccgtacaagcctcttccatagttacgacttcaaaaccttccatggcggcctgtaaagcacagatcggatctacttcggtcacaagcacccgtgctccataggagcgcatagaatgagagcatcctttacccacatcgccatagccacatactaccacaactttcccggcaatcattacatccgtcgcacgtttgataccgtcagccaatgattcacggcaaccatacagattatcaaacttagatttcgttaccgaatcgttgacattaaacgccgggaacagcaatttgccttcttcctgcatctgatacagacggtgtacaccggtcgtcgtctcttccgatacaccacgtacctcctctgcaacccgatgccaacgcgttttatcttccgctaaaacccgcttcagaatagcattcaattctatttcgtcttcagcgtgtacttctttctccaacacagccgcattgttctccgcatcatatcccacatgaatcatcattgtcgcatcaccaccatcatccacaatcacattcggacctttgccaccggcaaagctcaaagcctgcaatgtacaccaccagtaatcagccaaagtctcgcctttccaagcaaatacaggcacccccgaagctgcaatggcagcagcagcatggtcttgcgtcgagtatatattgcaagaacaccaacgtacttcagcccctaaagccaccaatgtttcaatcagcacggctgtctgaatagtcatgtgtaacgatcccataatacgggcgcctttcaacggtttggattctccatacttttcgcgaagagccatcaggccgggcatttctttttctgccaaatcgatttccttgcgtccgaagtcggcaagcgcaatatctgccactttataaggcagagtagagaataattctgtagacatattgtaaatcatttaatatattattatttcttagcaaccggtgcactcagcatttccttatatttcaccggatcattcaatatcttcaccgcttctttcaagccatcgtcgtctttcagttgctggataatattaccacgctgatagtaataacgcttaataatttccgaagcgatcatcttctttatatcaccggaaaagtaatccaaatcacggtcaagatcgtgattcaacttcttctcaagcgccttgaactcttccgaagcatccgccatatatccttcaaactcggctgcctctttcaaggttttcagaattttttcgctttgctggtcatacttgaaatcagccttcttcaccaatgccttaaagtcattataatcagcgtcggttacttcaaacttctccggagcaacaatagtaggatgctttaaacaatattgggtagcataatcgaaaattaaattatcacgtaccagatagaacaaaatattcggcaacttctcttgcttgataacaatatccggcattacaccacccccgtcgcggacctcacgccctgcagcggtatgaaacaccttagtcaaactatccggaatggttccaacacttccatcttcattacgatgcttgtagtcaatagcctgcacacaacgtccgcttggaatatagtatttggaagtagtcactttcattgttcccccataaggcaaagaacgcggaacctgaaccaatccctttccaaaagtacggttaccgacaacaatcgcgcgatcgaggtcctgtaaggaacccgataaaatctcagaagcagaagcagttccgctatttaccaaaaccgctaccggaatatccaggtccaatggttcacgtaatgttttataagtattgctggcttgtttgatttttcccttagtcgttacaatcacctttccacgcggcaagaaataatttgctatctctacagcctcgtccaacaagccccccccatttccacgaagatcgataaccaacgaggtagctccttgcttcttcaaatccaagaatgctttcttgaactccttcgaaggattgccggaaaaagtactcagattaatatatccgacatgattatcaagcactgcagcgtatggaatggccggattctgaatagattcacgtacaatggtgaactccatcagtgtacgtcccccccttacattcgggcgttccactttcagcttaaaactagttcccgcctgtccacgtaacatctggctgacttctgcattgttcttgcctgcaaggtctttcccatctatttccatcaaaatatctccggcttttaatccagccttagccgccggtgtgccctcgaagggttcggaaatcatagagcgtttcaattttgtattataagtaatgtaagaaccgataccaccgaaagatccttttatcatctgctccaactcactctgatcttcctccggaaaatactccgtataagggtccaacgtgaaaagcatattatcgataccctctctgatcgtcttattcggatcaatcgtatcgacataaaacatatccaattctttcacaatcgcattaaatatatccagattcttggcgatctggaaattgcggtcgtccccactcttgaaactaaagaaagctacgatagccgtaaccgctaccccaacaacagctatccgcccattcagcaattttttcatacttcttttcatataaatgaatcgtaaaagtaactcaatacttggttattcagccagaatcctgttaatatttaacttaatttcatcccagcgttctcctgatatcgtcgtaccgattgtctggataacatttcccgatagaatagaacctattttagcacacttctccaatgaatatccacacgtcaggccatatagaaaaccggcagcaaaataatcaccggctccggtcgtatccatcactttctttaccggaatagcagagactttaatttcttctgtccctttgcgaatataagaaccatttgcccccacttttacgatggcaatactgcatttcttcgcaatgatttccaaagcctcctccggttccttacccgtaaacgctttcgcctcttcctcatttgcaaagacaatatctacatacttatttattaacaaggagaaaaagtccatatcaccggcaactatattataacttgccatatcaagacagatttgcaaacccgcctctttcgccaactcaatggcatgaagaatcatttcatggtcctgcaccaggtatccctctatgaacaagtatgcatatcctttaaacatatcgagagataactcctcagctttcaaagaagcagcagctcccaaataagtcccgaaggtacgttctccatccggtgaaataaaagtagatgcaacaccggaaggcaactgttcagacaccaatactttatcctcaatattgtttttccgaagattttcacgaaaaaaatctccataatgatcatttcctacttttccgataaaaccagttccagctcccagacaagccagtccaagtatagtatttcctgccgatccgcctgttgccagatgcgttttcatctgcgagaattttgcgttaatctgctgtaacttagcatcatcaataagttgcatgcttcctttgggcaggcccatttcatccaaaagcgtatcatcctttagggttgcaagtacgtcgactagggcgttgcccaatcctattattttatccatttctaatattttttttgcaaagatattgcatatttcaaaaaaacctagtacttttgcatcgcaattgagaaaaacattcttccttagctcagtcggttagagcatctgactgttaatcagagggtccttggttcaagtccaagaggaagagcaaagttgaaaatcttgattgcaaacattcttccttagctcagtcggttagagcatctgactgttaatcagagggtccttggttcaagtccaagaggaagagcaaaagtcaccttttcgggtgacttttttgtgatattccattcaatccgccatcgccaaagtcaacacactagtccgtgttccttcgacctccaccagccgtgaagcacacgcgataatcgtggcccctgtagtcaatacatcgtccacaatcaaaatatgctttccggtcagagaatccgcatgattcagttcaaaaattccatctacattctcccaacgttcgaatacggatttgcgtgtctgtgtctccgtattctttcggcgaaccaccgattctacacatacggtaatacccgtcacagccgcaataccccgtgctatacattcgctttgattatagccacgaatctgttgtttttttttatgcaacggtatgggaattatcacgtcaactccttcgaagaaacccgaatccgatagctcggcagccatatatcttcccatgattattccaacctctttctttcccccatacttcaactgatgaagaatctgtcggaaatcgctccctttccggtagaagaagaaagaagtggctcgttctagaggtatttgtccccagaaaaatcgctctaccggattatccttccggagatgatagttcgtacgcgggagattgatattgcacatgatacaaagacattcttcaccttttgccagcggtctgccgcaaactacgcaacaatgagggaacaataaagataagaatgaattgagccagtcttttataaaaaatgtgtgtttcataatagtagcaagggtttaataagcagaccgtttctcctacatatctaacggagggacctccgccaatagcttctgaaataaaggatgaaggtatccgttcgttgcaatgatatgatgtccttctataaagtggtcctcaccatagaaattagtaacttttcctcctgcttcctgcacaatcaaagctgccgccgaataatcccactttccaataaaagcttccgcccaagcatcaaaacgccccatagccacataacaaatggctgcggcggccgaaccattcattcgaataccacctactaccccataaagccgatctatcaaatggagagccgtttgtttatattgcagatggttataaggcaactcggtaatgacgaacgcatcttttacatcccgaatatccgatacatggatttccttaccattcataaaggcctttccacctttccacgcataaaaacattcatcccgacaaacttcataaacgactcctaataaaagctcggtacgattgcgcaaagcgatgcatacacaataaggagcctcatcatggatataattcgtagtgccgtccaacgggtcaatcacccaaaaataaggttcatcctggtaagtgaccgacccttcttccgttataaatccagcttcgggtagtaaagcggaaagagctctcactacacgtacttccgactccttatctacataagagacataatcatgcgcatgtttctcttcaacacgttcacgacggaaattcttacgttcttctttcaaaaaatgtccagcttcagttgcaatacgacacacatctgctgtaagttgctttaaatctaacattccaatatctatattaaaagtgcctcgaaggtatagcttttctcacgaaaaaccattgaaaggaattgctattttcataagagtagcaaactttaaacattcatagtaagaaaacaaaaatcccagcatactagaacgtttttttatttttcacctctcatatctctcataaattacagttaacacatacactatcaatagaatagcaaatgagagatgatcctaccagcctgtatctctcatacttttcccatcatctctcagtaagcgtttcggcgatgccatattttctatcttaatttttccttttagctttgcgtcataataaaaaaccacatcttatgaccccaaaagttagatactaaacttttggggtgaaattcaattccacgattcaagctatcatatacattattcagaccgttatatccaacaaagtttctccctttgcattcaacaccctgactctgagctcttctttcctcttctcaagaatcatcacggtagcaccctccatcttgtatcctccacctataataaccggaaaatgattccccaactcacctttcgggtgataagcatacttatgagtatgagcattcagacagatatcaaaaggagctttttccagcaatttagtccatagttcagcacaaagattcttcccatcattgccataaagagggatatgatgcaggaggatacgtttcttcgctttcttaaattctttggcggaaagttcctttttcaaaaaatccacttgttcatttcgcaactgggtaaaatcattcaaatcataatagacccaatgggaatccggtttatcctctccacaatcaagcataacgatgcgggtatctccccagttgaaagaaccgtatgttttatttcctacatagtcgtaatggtcacgtaaaccgatagagtaagcattgcgaatctcatgattaccacgcataaagaaagtcggtacacggtcactatgtacaccttcggtcagttcacagataaaagaggtagcttgttcatgatcgacaggatcgtctacacaatcgccattgaaaactacaaaatcatagttgatatgctgtatctgtttacataaagcacggaaagttttcgtatgttggtgcaaatcattgaagacaatagcagtaaaggaatccgcatttgttgccggaagagtaaattcactgaattccgaccgggcggtatttccgaatatctttttatatgcttgataaagcaacatttcttgtgaacatacacgataataatatttctgtcccggtatcagatcgttgatatgtattttatgcagcttattattgcagactacctgtccgtcaacaattgtacgagcgcgtttcagttgagtagtgtctgttccatattccacccaacaatatgccggaacggtagtttcccacataactgtcataccattacctatgggattctgtaaataaggtttagtacgaaatattttatctgccttttcagctgtacgcaactcaacaagtataggacgatggtcggaggccatcggttcatccaacacttgagaggatataagagcgaagccattagcatttgacttcaatgcggtaatataatctatagtctccttgggatcagaagccggataagtagattgtttaggattggagagcatctgaaagtttttctgtaactcctttataaaatcggattccggttcagcattcatgtccccagccagaaaaagaggctttttataaggagcgacgaatgatttcacgacctccaatgacttcatacggtctttttcggtcaacgacatatgagtacaacaatagatataatcctcaaattctgccagaatcaaggtgcgggcctcttctctaccaggtaaagggatagtttgtaaacgtagcggaacttgctttgtcaacagtccgattccatatttacctccttcaaactctatagcaggtgcaaaacaagcatgcatttgtgtacgttcagctatctcacccagcacatatttctgtccgctccgacgggtcatactgtccacctcttgtatagccacgacatcaggagaagtattatttatcacattggctacccgttgaaaactacaaatatcatccatgccattcgcatttttaatattataagtcatcagtctcaatgtatgttgagcctgtactggaaaaataaataggatgacggaaatgagtaaaaagatctttttcatgttcttcatttttggggggtatgttaagttcccccaaaggtaagaaaaaaataaaaagccacaaagatacggattcatacctttgcggcctcttattgtcttgtttgcgtgtctttcatatctgaatatatcagataatccctctcactctatcgtcaaatgcagaaagcgcagctttcgctccttcgcccatagagataatgatttgcttataaggaaccgtagaaacatctccggctgcatagatacccgtcacattcgtacggcaatgtgcatcaatcatgatttcgcccggtcggttggtttccactatgtcgcggaatacactgctattcgcagaaagcccgatctgtacaaatacaccatccaactcaaccaaacgttcttcttccgttttacgatctttgatgcgcagggcagtcagtttatcaccatttcctatcacttccgtagtctgtgaacttacaaacacttccacgttcggcaatgatttaagtcgatcttgaagtacactgtccgctttcaactcattcataaattcaaaaacagtgactttggagcagataccagccaagtcaatcgctgcctcaatgccggaatttcctccacctactactgctacatgctttcccttataaaacggtccatcacaatgagggcagaaagcaacaccacgaccgatatactccgcttctcccggaacattcagtttacgccagcttgcaccggttgcaataatcagtgctggagccaggaatttctccccaacagaggtagttactatcttttgctttccaagtacttctactttctctattttacgatgttccaataaatctaccggataacgcagtaaatgagttttcaaattattagcaagttcatttcccgtggtttctgggacagaaatcagattctcaatgccgacagtttcctttacttgccctccgatgcgttcggctacaatagccacacgcagccccttacgagctgaataaatagcggacgatactccggcaggacctccaccagctacaatcacatcatactctttcacctcattcatcgctttggtatcgtcaataccatattgttcctccagcttggcgagcagctcaccgaattcaccacggcctacatgaagcagctttccatcggcaaatacagaaggtactccctgtatcttcaatgcatctacttcatcctgataaagtgcgccgtctaccatttcgtgagtaatggcaggattcagcgttgccattgcattgagagcctgtaccacgtcaggacaattcgtacaagtcagtgagacgtaagtaactaagtgcatagggcctttcagtgctttcacacggttacaaacagcctcatcgggaaagttcttccctttaccatccagattgaggatagcaagcagtaaagaagtaaattcgtgtccgttcggaataccgcggaaagtaattcctgtggcgttaccattctttaataaagtaaatttcagcccgtttccttcattcaccgaataagtgatatgatcggaacagtctgccacatctcccaaaagttccagcagttcagcacgattctcatgactggacgatacggatatatcaaaagcgaaatttgcctccagtccggcaaagatacccttcagttgttcttttaatgcggattctaacatactttttctcctttattatttcttctctcgcttattctttttctctctcttttttctcttcattacttgtactctctccactgcttaaaaaaggccggcagcgtttcccgttaccggcctcccataatcaccattatcaagatctatcaaatcttacctaccaggtcaatgcttggtttcagggtagactcacccttcttccatttagccgggcaaacttctccgtcatggctggctacaaactgtgcagcttccactttacgaagcaattcacttgcatcacggccaatattgttatcattcagttccaccactttaatctttccttccggattgacaacgaatgtaccgcgataagccataccttcttcttcgatatatacacccagtgcacggctcaaagcgccagtcgggtctgccaacattgggtattgaatcttgcgaatactttcagaagcatcatgccaagctttgtgcacgaaatgagagtcagtacttaccgaatagatttctacacccatcgccttgaactgatcgtacttttcagccatatccaccaattcggtaggacatacgaaagtaaagtcagcaggatagaagaaaagaatcgcccatttacctttcaggtcattgttggttacagtcttgaaagctccgttgtgaaaagcctgaacgctgaattcaggaagttgagaatttaaaattggttccataatctttattgcttttattgttattaattgatttgacttataacatcagaaacaatgttttgttttttgtttctggtgcaaagataaaggcagaagccccgcctttgcaaaaaaagtccaatcgaatatttctatgcggtgatagatgaaattaataaaagcattttatacctttgcgtgcataaacaaaaacctggaaaatatatacgattatggaacatcctcttgcccaattcttatattgccctgaatgtggttcctctcattttgaggtcaacaacgagaaatctaaaaaatgtgcagattgcggctttgtctattatttcaatccttctgccgccacagtagcactcatcttgaatgagaaaaatgaactgcttgtctgccgacgtgccaaagagccagccaaaggaactctcgacctacccggcggattcatcgatatgaatgaaacaggcgaagaaggcgttgcacgcgaagtgctggaagaaacagggctgaaagttaaaaaagccgtttaccagttcacacttcccaatatttatgtttattcaggttttcctgtacacacactcgatatgtttttcctctgcactgtagaaaacatgagccatttctctgccatggatgatgtagcagatgctttcttcctgcctctctccgaaattaattcggaagattttggactggattctattcgccgaggacttaaaaagttcttatctggcagataattcgttaaaatataacaaactacagaaacatatcccctttcattctgtacttttgcataaacacccgattatgaaaaaagaaattactagactcatttgtgcggctatctgctgcacgcctattataggatttgcccagacaagtgataagttcacttcgaccgacaacctttataaagaagggaaagaacttttccaggaaaaaaattatgcagccgccctgccagcactgaaagcatttgtaaaacaaaagcctgccaccagccttcttcaagacgcagaatacatgctggccagttccgcttatgaactgaaagacaaaaaccggatcgaaatcctgcgcaagtatctcgaccgctatccggacactccttacgccaaccgtatttatgcactattagcctcctgctatttctatgaaggaaaatacgacgaagcactggcgctcttcaactctaccgacctcggtctgctgggtaatgaagaacgggatgactgcacttaccaattggctacctgttatctgaaaaccgataatctacgagaagccgcaatttggtttgaaacattacgtgccaacagtcccaaatatgccaaagactgtgattattatctctcttatatccgctatacgcaaaaacgctataacgaagcactgaaaggcttcctgccgttacaggacgattcgaagtacaaggcacttgtcccctactacattgccgaaatttatgcacagcttcaaaactacgataaggcacagattgtagcacaaaactatctgtcggcctatccaaacaacgaacatactgcagaaatgtaccgcattctgggagatgcctactaccacttcggacaatatcaccaagcagtagaatcatttaacgaatatcttgataaagatcactcagcagctcgtcgtgatgcactttatatgctgggactttcttattatcagacaaaagtctattccaaagcagccgaaacattaggtaaagtgacaacaaccaacgacgcccttacacaaaacgcatacctccacatggggctctcttatctgcaactggcagaaaaaaacaaagcccgtatggctttcgaacaagcagccgcctccaatgctaatatgcaaatcaaggaacaggcagcttacaattacgctctttgcctgcatgaaacctctttctccgctttcggcgaatccgttactgctttcgagaaattcctgaacgaatttccgacttctccttacgctgaaaaagtcagcagctatttggtagaagtttacatgaatacccgtagttatgatgcagccctgaaatccatcgaccggatagccaagccaagcgctcagatattggaagccaaacagaaaatattgtttcagttaggtacacagtccttcgccaatgccaactttgaacaagccttgaaatacctgaatcaatccatagctatcggacaatacaaccgtcagacgaaagcagacgcgtattattggtgcggagaatcctactatcgcctcaaccgtatgacggaagccgcacgtgacttcaatgcatatctgcaactgacaacccaacccaacaatgaaacgtatgcacttgccaattacaatttaggatacatcgctttccaccgaaaagattattcccaggcaagtcactacttccaaaaatatatccggctggagaaaggagaaaatacaaccgcgcttgccgatgcctataaccgtgttggcgactgttacctacacgtacgcaatttcgaagaggccaagcattattattcacaagccgaacaaatgaatactccctccggagactattctttctatcaattggctcttgtgtccggtctacagaaagattattccggcaaaatcaccctactgaatcgtctgataggaaaatatccggcttctccatacgctgtgaatgccatttatgaaaaaggacggtcgtatgtgctgatggataacaataaccaggctattacttcctttaaagaactaatgaacaaatatccggaaagccctgtcagcagaaaagccgctgcagaaatcggtttgctgtattatcaaaaggatgactacaaccaggcaatcgaagcctataaacaagttatcgaaaaatatccgggcagtgaagaagcccggatggctatgcgcgatctaaaatcgatctatgtagatctcaaccgtatcgatgaatttgcagctcttgccaatgccatgccgggacatatccgcttcgatgccaatgagcaggactctctgacatatactgccgcagaaaaaatctatatgcggggacgactggaggaagcaaaaacaagtttcaacaaatacttgcagactttcccggaaggagctttcagtttgaacgcacattactatctctgcttgatcggaagcgaacagaagaactatgatatgattcttctccattccggaaagctattggaataccccaacaatccgtttgcagaagaagctcttattcttcgtgccgaagtacagttcaatcagcaacagactgcagacgctttgaccagctataaaatgctgaaagagaaagcaactaatgtggaacgccgccagcttgctgaaaccggagtacttcgttgcgcttttctgctgagagacgacatcgaaacaattcatgctgctaccgacttgctggcagaagccaaacttagtccggagctaagaaacgaagccctttattatcgcgccaaagcatataccaagcagaaagccgataaaaaagctgtggatgatttgcgtgagttagccaaagatacacgtaatgcatatggagctgaagccaaatatctggtggcgcaatcgctttacgatgcaaaagaatacaacgccgccgagaaagaacttctcaactacatagagcaaagtacaccacacgcttattggctggcacgcagttttgtccttttgtccgatgtatatgccgccatgggcaaagagttggatgcacgccaatacctgttgagtctgcaacagaattatcaaggcaacgatgacatcgcaactatgatcgaaagcagactgagcaaattgaaagttaaaaattgaaagttgagaactaaaatataaaactaaaatgaaacgatctctttatataataggtggaatcacattggcaatctccatgccatcccatctcctagcccaaacgacacagccgaaagatacgaccatgaatcgtaccgtcgttgtggaacaagaatacaatccggacatcatggatgcttccaaagtgaacgtcctgcctaaagtcgaagaaccgactgtcagcaaaaaagaagtggaatatgccactacattctttccggcaacttccgttccggcagggttgatgaatccttataccggaaaagaaatacaacccggaagcgcccccggatatgtacgtgccggttacggcaatttaggcaatctagacatcctcgccaattatctattccgtctgtcgaagaaagataagctgaatgtacgttttcaaatggacggtatggatggaaagttgactctcccttacacagacggcgaaaaatggaatgctttttactaccgcacacgtgccaatgtggattatacgcaccagttcaataaattagacttgaatattgccggaaacttcgggctaagcaacttcaacttcctgccgggaagcgtcaacagcaagcagaaattcacctccggtgacttccatgcgggtattcatttcattgatgagactgcaccactgcgtttcaatgcagaaacgaacctgttgatgtacgaacgccaacacaatatgatcagtgaaaatgatgcaaatacagccatcaaggaaacaatcatacgcaccaaaggtgatgtcacaggagccatcaacgatcaacaatccgttactatcgcattggaaatgaataatcttttatacagtggatacactaagaccccatctacgggagatgaatatttcaagaactatacgactctacttgtgaatccatattatgaattgaataatgacgattggaaattacacatcggagccaatgtagatttatctttcggattcgacaagtcattccgtatttcaccggatgtcactgcacaatacattttctcggacagttacattgtttatgcaaaagcaactggcggtaagcaactgaatgatttccgaagattggaaagcctttgtccatacggagactcttacttttcaacaacatctgccgaatcaagcaaccgccgtccttatgacacgtatgaacaactgaacgctagcctaggactgaaagccagcccttatccaggtatatggttccaactgttcggtggataccagaatttaaagaatgacttgctttactcctattcaagtttgtccgatacaagcatcggaacagtaagtaccatgctcgctttcacacaaatacacaccgataatgtctatgtcggcataaaattaacttatgactacaaagatgtactgtccctgtccgcccattacatataccgcaactggaacagtgacaataacgaatatctacttgccgtaaagcctgaaaatgaagcatccatctctctcaacgtacatcccacctctgcacttcaactgaacgccggttttgattacatcagccgcaaggaggaagcaacatctttcaatatgtcagatattagcgatctgcatatcggagccagctataatgtattcaaaagagtatccgtttatgcgcaagtacataacctgctaaacaagaaatatcaatattatttgggctatcccgctgaaggattcaacttcttaggaggactgagtttccggttctaagataaagaaaagggggcattcctacttatatgaataccccctttacaaaccaaaacaaccttcaattattttgttatccttataacaaatccaccaccgggagccatgtgtaatttcaacttcttattggctgatacgcggatcacttcacgtttataatctttcccaacacgatcggcattgataccatctctaaatatttccgcattgaactcaccatcacccaagaaagacagatcgacttcaacatcacgctctttccagtcggtcaatccacctacataccaaatgccgtctttctcacgtgccattacaatatgttcgcctacttttccgcttatcggaagtgtctgattccatacagtaggaatggcagcgataaacttcgtacattcttcctctttcagataattagtaggtgcatcacacagcatattaataggagaatcaaaaatggtatacaatgctaactgacggcaacgggtaccctggctcatcggttctgtatagacagcatgaaagttcttcatgattacgttattcatcgctccctgcgtataatcaagcggtccggcaaccatgcggatgaaaggaactgtcacatcatatatcacttgatctgttcccggttctgcccacttcatttcttccagtccatggacaccctcgaaattgatcgtattcggataagtacgttgcaagccagtcggtttgaacgttccatggagatctatcagcaatttgtattttgctccggtttcagccgctttacggttaaactcaactacttgttggtcgtcacggtccataaaatcaatcttgaaacctttgattcccattgcggcataatgcttacatacacgatccatgtctttttcaaaagcacgatagcccgcccaaagtatcaaatctacatttttgctttttgcatagctaatcaactctttcaaatcgatttcaggaatcacctcaaacaaatccgctttacccggcactgcccatccctcatccaatatcacatattcgataccgaatttcgaggcaaagtcaatatagtatttataagtctcattgttgatacctgcgcggaaatccacgttgtagagattccagtcgttccaccagtcccaagccactttacccggtttaatccaagaaaaatctgtaaattgtgccggagtagccagtttatataccatatcattgcaaagcagttctgcatcctccttggcaatgaccatgacacgccagggaaatgctgtgtttccctccactttagcaatatagggttcacgagattttactacccctttcagcccgcgaacttcgtctactatcgttttcggataagctgcaaagattccatccagagaatatccatgctcaccatgtttcacatacatacccggatagttcatcaaatcggcttcagtgatacagattttctttccgttctttccctcgaccaaaaccggtaaaaaggcaatctgttccttatcccatgcagacaaggcagtttccagatacgtattttggaaagaactgtagaaaggatctttcttgccctcgttcattcggcctttcggtgaagctacaaaaactttcggatcattcggaaaacaaaaagaagcctgctcgctttccaccataaacggcttcttcagttcagagacaaaacgataggctgcaccatcttcataagctctgaacaccaagctatatcctcctttaaagtcaatggtcagttcattgaactggtccttgattgatttcttcttatagatgggaggatagatagtctcatttacagaacggcggctaatcttctttactttcggattgagtccgaaagctgtaccatcagttagtttcatgaaaataggagacggagccaccatcacatcgttgtcgtgaagaacggagtattccacattcttatcattcacaatcacgttcacctgcactttaccggaaatgtctttcagctcgtacactttctgtgcacaaatggttagaggtgcgatagccattagaaccggcaaaagtcttttcatcatacgtttcataaactaatactttttgtatttcacacagttttttatttacatatttatcataagagtaccgcttggcagagataaaggagggagcttaacagaaagaatttcctgctaataaagcattgaacaagtgctaaatagaacctttcttatctcattcgcgctactatttttttagaaatcaattgtcacctgataggtatccttattctcaaagaaagcctgttgtacctcatattcgggaagccatacgtatttcttttcccctttatattcggcttcgagcaagaaagtgaaccagcgattataaggcaattcgtctgtatgcaaaggaggtgcgggactatcatataagttggggacaccagttatcagacattctcctttcttatccgtctcataagtacggtaaggagtagcgatcagatcattaaattttgcacgtgaaccatacagattcagctttacccctttttgctttttacctttcacttttacagatacctgtatgttttcggggaacatttgtttgaagaatccgtcgaaatcacgtctcggacgtttggacttggcagtgtgattgattatatgaactgcatacgagctccatttatatgttttataatgactgttcatcacacaagagtcaggttcatattcgatatggttcaccggattgttctttgcccggattctatcagcatacaagtcggttaccccacgataatgtccgaactcatgtgccactcctctatgaaaatagtcgataccaaacagatcttcatgttccgtcttgctacggctacggcaaattaccatattcagatcgtccgtcccaccgccgcaataccatcctttagccgattcttcatcgtcaaaatcaagaatagaatctataatcagcagtacatcgtgattgggaaaaccggcactcttctgatagattttctccaattggcgggaggaacagttgtaaatcacctgcagatccggtatataacggaaatagtagttgaaacgtccattgccggctttgttccagaagtcgttcacttggtcgaaaaaagcattcagcttcgcttgataagcttctttacctccccaatgcttcactccagccttatcgacagccacaaatacccggtattcaatggtgtctaaagattgttgaatctgattttcctccaatgtctttgcctccatccaagagaaaaaaggcaatagagcgggaaatataagccatcttttccagttgtttttcatattagttcttagttaagaatgtattttatttcttgtaaatcacgactatttccaccgaccatcaaagtgaagtctcctttctccacaatgaacttcatctgattattgtagaatcctagttgttcatcttttacgtcgaaggtgaccgttttgctttcacctggattcagtttaatcttttcaaagcctttcaattctttgatagggcgagtgatagaagccacctcatcacgtacatacaactgaacaacttcctcgccctcgtattttccagtattggtaaccgttacagcaacacgtgtataaataccttttccatcacccggaagcagtttcacatccgaataattgaaagtagtgtatgacaaaccgtagccgaacggataagcaggctccgtaggaatatcaatgtacttcgcacaccatccgcccaatgcagtggggcgtcctgtgctcttatattgataatacaatggtatctgtccgttatgctgcggaaaagtcattggcagcttacccgaaggattataatctccccaaagtacattacaaatagcgttacccgcttcactccccagccaccaggtacataagatagcgggagcatcccgacgaacttcattgaaaataacaggacgaccacacatcattagtacaactaccggtttaccagtcttcaccaattcggaaaccaaacgctgttgttcggcagcaatagaaatatctcctttcgaacgcatctcaccactttcccaagcttgttctcccattgcaacgataaccacatccgattggcgggcagcagctaaagtctgatccagatttacaattttattcgttttcagatcgtacccatcattatagttgatgtccactcctcgtttctccattgcctcatacaaggttactactttaccaacctctgcacaggaccatgcaccgcacatatctttctgcgatttggaaagcgcaccaatcaaagcaactttcttgatagaagaagaaagcggtaacaccgagttttcatttttcaaaagaacaatagaacgttcggaaacatagcatgcttccttgcgggattcctgtgaaccaatcactgtacgttccctttcttcatcacagtatctgaacggatcatcaaataatcccagtttatatttctgttccaaaatacgtctgacagcatcatccaccagcttgatagataccttaccctcttttaccaaagacaccagattcttggaatagcattcactgaccatctccatatccagtccggccttgattcctttataagcagcttctttttcatctttcgcataacggtggttcatcatttctcccactgatccccaatcggatactacaaaccctttaaatccccattgattcttcagaagctccctcaacagaaaagtacttccggtagacggttcgttattaaagtcattgaacgcactcatgaaagtagcagcaccggcttctgcaccagccttgtaaggaggcatatagaaattggcaaactgtcccatcgacatatccacactattataatcttttccggcaatagctgcaccatatccggcaaagtgcttaatacaggataaaatagtattctctttcgataaatcatctccctgtaaaccatgtacacgcgccttagcaaccaacgagccataataaggatcttcaccggccccttccatcacacgcccccaccgggcatcccagctaatatccaccattggagcaaacgtccaatgcaacccggctgccgcagcttcctttgccgcacatctcgatcctctttctatagcatccagatcaaaactcgcagcctctgccaatggcaacggaaaacctgttctatatccatgaataacatccaatccaaaaagcaaaggaatctgtaaacgtgatttcatagctgcctcctgatatttacgagtattggcagcaccggatacattcagcaaagaaccgatcaatcccttacttatatcttctgtccgactgatacgtgtattatcaggacctgtggcaaatccaccggaacattggcttagctgccccactttttcttccagtgtcatcttttccatcagaccggatatgaaacgattcatttgagcctcatccttttgattctgcgccatgcttcccatagcgaaaatcgccatacacgaatatgcaattagtcttttcatcattttattataagagtttatctgtattgatttaaatgttaatatcctccatacgctttactttctatcgcaaagatagccgctggtcagattcacattggcgaattgcgtacaaaaggacaataatatcgtaaagtctgctttttttctatttctttccgtatagcattcaagcacttctgtcatttttttgcctttattgatacgattttctccttactcttcacttattcgtaagagatattatccagcacttttattccctctttccgaacacctgcctcaaacagattcttgaacgattctaccgacaatgaagtggacggtttaaaatctgaagaattcatatacgccagcaaaacggcatagaattgtaacccttccggtgtgtcacgtaccgcttccaaatcggacatacaaagcagtaatttaccgccctctacattcaactccatcaataagccgagtttatgatttcgttccacattgtcaattacctgcacaatagggcggtattcttttggcataccatccagaataagcggatagctatgtttgatgattggataccactgccagttcgtatggtattcggttgggaaatcattgaataccggatgcgtgggattggtcagaattcccaatgtaccaggtgaagcaggtttcttgatgcgatcacagatacttttgaacatacgataattccaatagtcggtctggaacaatcctcccactgttacttctttacagtcttccccacgaggcatcaacagtacctttccaccttgctttaaagcattcagcacatcatccgttagttggcgggcaactacaacattacctgtcttcaattgcttctttgcaggatatatccatagcggataactattctgataggaagttccggatactttcaaaagtaattcggctttatacgcttgctccacatcgggcaatgtcaaacaaatagttccgacagtcaataatcctaatcccgatggaatagccaccttacctttgccaaggcttctcttcctatctttgagttcccatgaaatactttttccgttcaatgaagtttctccataattggcaatctcaacagtacctgcgaatgattcaccgcctgtccaacagaacttggcagttgtcaataaaggaaccacttcactacagaattctctccattttttcggttcaaccaatcctttactatccataaaagcatccagaataccaacataagcagacccctgtcccggataatcctgtaaatcgagtaactgaaaaccagccatccgtttggagcggagattcatttcaatatctgcccgataaagttccaccgaccatgcacccgatgctttaaaaaaatcatccgcctgttccagcatgccgactttctccaagcggtcacgaaacacttcaaaattccagggagctaagactcctgtatatttcttcatctcctcataatttgggtaagtttgaaactgtccggtttcatgtccgatcaccggaacaggagatttttccagagcctcatcaaagttcattaccgaattaggataggtattattaagatagccaccttcttccgcatctgcgaaagagaaagaagcacgagcatgagtagaataaccctcaccactgcctacacgacaagttaccagaaaatcctcacccggaatatgtcctcgtgagcctaaaaagatattcgaaccatacgtgtataggtgcctcggctctatggaacggaaacgatctacaaactctttcatcacatcgatgtcacctcccagctcattccccaaggcaaagagtacaaaagaagcatggttactatattcacgcatgatattctctccatctttcatcagaaaatccatcagctcggcagattctttcttaaaccctccccagataggtaattctggctgcaagtaaataccctccaagtccgcagcttcaaaacacgcagtaggtgggcaccaagaatgaaaacgacaatgattcaatccatattccttacaaatcctgaaataacgacgccattgttccaagtccatcgccgtatggcccgtcaaagggaatacacaggcatcatgttttccccgaagaaatgttttggcgccattgatagtgaaatgcgtctcttcagttttaaagtcgcgcaaaccgaaacgaactgttttctcgtctatgccatttatctctgctttcagttgatatagagccggctggaggtcactccacaatacagcattatctcccaactgataagtgaattcatattccttgctcccctctttcaaatcatattccgcagatctggctttatgctttttggcagtattgaaagcagaagctgacaactgtagtttcttcccaccaatgcctgaagaactggaaagagttattttcacttttacggagcggtcttctacctgaggaaaagcctgaatggactcaataaacaatggattcattgcccgcaattccatccgtccgataataccgttccagtttgtctgggtagattccgtacaagcgtgagaacttgaacgaatctgcccgggaatactttttccgttatctacacgaatagtcagcttatgtgaaccgggagccaggaagtgagtgagattaaattcctgtggggtagataaatagttgcatttacccacttcccgaccatcgatccacacggttgtcggacgagtacgttccagaaacaacacgatatgcttttctttccagtcggctggtatttctatattccggctataccatgccgcaccttcatatttataatatctggacaaataagtggtctccgacttgttggtattctctattccttttcgatttgaatctgttgtaccgggtaaagtcacagtttctgcaaaatccatgttccacagtttttcttgttctcccttgtcgtgagggtccaatgcaaaactccacgttccgctcaaatcaatcattttgcgcaaacctgatgtctgcgcccatgatgtacacaaaaaaacaaataataataaaagagttccagctaatcgattacgcataactttattcataatatatgatttaatgtccttaatttatctgtttacaaagataggacggagaacaaaccacaatgacaaatcccgtacaaaaaaacaataatatcgtaaaagatactgtgtatcatcccttttatatcactatcagcatgataatgtccttgcctgactgataaaatacacaaatagttttttcatagcttcatccccttccacagcctgcaactccgggtggaactgaacaccccaaatatgttcggaatcagattcgattgattctatgactccatcatcagcgaaagcagatgccttgaatccacaagccaatttcttaacggcttgatgatgaatggaggagactttcaaacttgccttgcctgtaacagaatacaattttccggtcctcaaacatcgcacattatgctgtaatatcataaacgcatccggtgaccgatgattaatttccgagggatattgagcaggcaaatcctgatataatgttccaccaaaataagtattaataatctgcattccccgacaaatacctaaaacgggaatttgcctttcggatgccaagcgcagcaaagcataatcaaagtcatccctatcccggcaacattctccacattcaggaagagtcgattctccgtatatcacaggcgatatatctcccccacctgtcaggagtaaaccatcaatagaagaaaccacagattgtaaaatctgtacattgtcggtaaacggaagaataaaagggatgccgcccgcttgaaggacagcatccacatattttcttttcacagatattcttcccggaatatcaatttcagtagaaataccaataacaggaatttctctttttatcattctcgttgtcttttatcaacttaatccacagcctgtagttgtaaaaccaaacttgaatattcacttttcagcaatgattttaatgcaatgccttcttccatcaatatctttccactaatgattttaccattcaggtcacaaggtttgctactgtccacaggtgtcaaatctaccaaacgataattcttcgacggatccaatccattcatacaaaccttcggaataaccatattgatgaaatgagaaatcttatatgcataaaagaccgccttattcttttcggaagtgacatacatcagagaggatactcctttattatcgtatggagacaccaaccgatacaaatcaccgaactgaaccacaggacgaatatctttatacgctgcaatagcacgtttggagaatgccttatcaacatcattcatgtccttcggctgaattttcattcccaatcgcccggacattgccacatcaaaacggaatttcaatggaatacggcgtccggtctgatgattcttgtccgcacttacgtgagatgccatcgcaatagccggaaagaaaccggaaactccccattgcatataaattctttgcaaagcatccgtatcatcactcgtccagaactcatcaaaatatggaagcaatccataattgacgcgggcaccgccaccagcacatagctgcatcacgagttcaggatacttggcacgaatacgctgaagtactttctgtaaacccctattatactcaatatagagatgtgattgcttgttttttggtaagtaggaagaaccataatccagcaaactgcaattatcatcccatttcatataggcaatttccggatagttcgtcatcaaattattaaccactccaaaaacaaaatcctgcactttcggattagtcaaatccagaactacctgcgttttgccacgcccggtagataaaggacggttatcaattttcagaatccagtccgggtgcttttcgaacagttcgctcttagtattcgacatttccggttcaatccagataccgaattttatatgatgcttcctggcagacgcaagcaatccttcaataccttcaggcagtttttctttgcagacttcccaatcacccaaactactgtttccaccattacggggatatttatttccaaaccagccatcgtccataacaaacaactctccacccatggcagagaaagcttccatcatctcatccatccctttttggtccaccttgaaataaacaccttcccagctattcaacaagatgtcatgcagcctttcaccctgattcattttatattggcgtgcccaatgatgaaaagcacgactcaccccacctttgccattggtactatatgtcatggcaaattcaggagtgacgaatgtttctttcggttccaatatgtattgtgaactttcctcattcataccgactattatattcagtgctgtgttgcgaacatccagcttcaacttataattaccactccaagccaaaacgcccccaaagacttttcctgtttcttcctgcggtttgccgtccaacgacaacataaaagaaggattatccgtttccgtattcgccagtccgtctttgttagcaatcactttttgcccattcgtcagtttctcttcatccatcgtatgttccgcaccccaggctccatgaaaatgagtcagccagttgtccccgcgaaacatcggcaaataagcggaagcaaactgaaacagtgttaccggtttcttacctgcattgccaatctcaacccaagtggtaattatatccgttcctttataagccttataacattgtttcacccaaacaggatatatcttatctttcaaaagcacttccagaatctcaccgtcgtcaatcccgtattgctttacattatctactcccaaatccaatgacatattgccgtcggcatgggtaattgcgaccgccttttcgcctacggtctgaagaccgaatgctggataactatccgcttcgaaagccaaaccggcatcataaatattctggatctgaacgggagtgatactcactccataatattgcatttttgacttttcacccttattggccgtaatcaacaatgaggtccgaggagtggaaatcaagtaatcttttgacaacaatggagctgatatcaacagccccattgccatcattaaacccatctttctattcatggctttattgatttaattcattgtatcgtaaacaatacctatagaaaacgttgtaaactaacgatctttttacccttaaaattcaacttttacttcacagacatccttacctgtttccaaatgttgtctctgtaactctacatccggtaaccatacatatttcttctgtcccgcatcatctatcacctccaccaggaaactgaaccaataagagtaaggaaataagtcctgcggttccttaggcggaatattggggtcagtcatatcgggatgatacagtttatacagattggtcagttctacttttccttttttatccgtctgataagtcctgtacacctttgggtatacatcacgcttattatatttaccaccggcacgtgtaccatagaaattcacagtatagttggatttcgcctttccattcttttctaccttaatcaccagtttacgcggaaatacctgatctggcaagtccttatcgagcggcttcatcttcgccgtataattgaacaatgccgagcaataatcactccatacacgataacccgtccccatattacatttaggtggagtcagtttctcgtagctcacaggattgtcttctgcggcaatcatatactgatataaatccgtagcaccacgcatatgaccatattcatgtcctagattgctatacgttccctgattgggataaagcgcatccgtaaagatattatgaggttcgcgaatataacacatcactacagattgcccactcgctccacctcccccacaggaaagcccttcattctttgcacccaacgccaagaacaacacaaaatcatatttcgacaaatccaatggtccataagccttattcttaaattcatcatatttgtttttgtctccctgaatatcgtagacgtacaattcttcagcaggaacaaagcgaaaataataattgaatttattaggactttcattccaaaaacgcgtagtattatgaaacatctttttcaagttcttcttgaaatcctcttctccaccataacgttccaggtctgttttatcaacccatacctgggcacgatattctattgtatctttcacaatcgaagattgagcatgagctgccccaatcaggcagctacatgcaatcagtagatattttaaaatattcatgctaaacttattataactgtatttcaaacacatacggttcttgctgcccgccattcagatattcaggaacaatatccaaatccgacaaccacacacttttcgtctgtccaccatccaactcgacttctactacaaaacaataccagcgtgaaaaaggaaattcatcaaccggactcttagggggaagattcggagtattattataatctggaataaacatccggtatatatcattaatggtaaattcaccgtttgcatctgtttttttcttcatatatggagaattgcccggttctgcatatatatccctaaaagtggcacgtgagccccaaaaattgactgtggcacgttgtaccggtttaccatcttttgttaccctgaccaacatctgcttaggatacgtacttcgggtcatatcagcagtaatttgtttatattgggcattatggttaaatatcgccgaacaataatcactccattcctgataacccgtccccatattacacttaggataatcataagcaacatgactgaccggattgttttcagccggaatcatatactgatataaatcctgcgcaccacgaacatgaccatattcatgacctaaatcactatatgtacctttttccggccatttctttgcaaaaatatcatgcccttcctcaaaataggcctgtacaactgactgcttacttgctccgccaccgccacaagagagtccaccttttgtacaacgtaaagccagaaagagaacaaaatcatacttctctgtattcaaagtaccataagccttatctttatacacattgtattcggcttggctttttacaccactttttatatcgtaaataaccaaattatcatctccttcacccatcgcccattcaaagcgataatcaaacttgttcgtactttcattccaaaaagtagtcgtattgcggaacaacgcttccaaattctgtcggaacaaacgttctccgccatataattcttccatatcgtttttctctacccatacttgtgcacgataggtaatcgtttctcctgcctgaggtctatccggtttctcttctgtaataagtcccggattcgttatatcaatttcgagatcacacgcagccagtgtgaacaggctgcatgcgattaatatatacttccttaagtttttcataacttactaaatttattattcaacaacatttgaacgatcggacacaaaaacttcatccaaacacagaacttttttattccaaaaagtttcatatatcgtcaaacgaatatagcgtttttgcaatttccctaactcaaaccaatggattataccttcaccatggttattataacttcctgttgctccttttaattcagcctcagtaaagccattactatcatttttggtaacaactgttatccatccttcattaagatcatcactaacctctatttgaacagtttttggagcaggtgcagtccattgaagtcttggcacaataccaaaactgttgtattcacgcagattctcacctaagtcaaaaacaagtacataaggtttaccatcagctccaccgtcagtagtaattcctttattgaattccacgtatatatcattttctttcagtcctgtatcccaccaaacattatcatacaatcgcgggaaatattttttcatttctgtttcactgtactgactactaatattagtactatatgcaggtatattccaagtagacttattcaatataataccataccctttcattccttgtctgaaatctatttttccttccatgccggttttcacatttttcactccaatctttgctgtacgttccttattggtactgatattagcggtaacctctgcataaaccttaccatcttcttgactcaaggtcagccactcattctcaccgctcatttctatatctgcgggatttatatttttacaggtggcaacaagaattttttcattcgcatctgaagatactataaattctctctcctgttgataatattctggattccaaataatctcctctattccaaactgaataaccgaaacagactttctcaccgtaatatcaccagcagtagccgtaaaattaatcattgcttcacggtatacattagtagtattctccttgatcagcaaagacaaaaccttagtatcggtatctatctgtgccacaacatcttcctttaattctatccaactttggttatcctcatctggaaaatcgatatctatcacaggcgacgccgtaccttcataggtcaaaagtttcagctctctatcccccgtttctgtaaaatctttaggcaaagtaacagaaaatgccccatctgctttctcagtaataaatacctcttccggaaattctgattcatcaatagttcctacagtcagaagttcttctacatttccttgaataattgttactatttttttcaccgggatttctcctttggtagtaatcactacagatgctttgcggtcttttgctgttacattatcagcaatgacaagcgacaatgatgctgcacctactccaccctgcactgaaggagtaatccactcttctttttcatttgtcatatataaaacttccactttccatgccttgtccgttttaatccccaaggtcacactccctttatactcagttggcaaagtcactttccagtgtccgtctccagcttcctccaaagtttcattgcatgatactgtcaacgcatcaggtgtccagtccacctctttttcatcattacaagcctgcaaacagagcagacacgatagtagtaaaaatagatttttcataaatatattgtttttactatttctatattccattatcttttagaaacaaatatttcatccaagcagtgggtgctataccatgaatcccacatagacaagcgtatataccgatgactcatattttcacccaaatcataccattttacaaactgtttgtcagtgtaccaatcctcccagttaccactatcatgagcatccaattccgtctttgtgaatgcatcccttttagcactgccaacaagaatccaattcgtaatgtcttcactgcgtgtcaacacagcatcactaacttcgatcttcaggtatttaggtgaattccctacccattgtagtctcggtatcaatccgatcgaattatattcatgaggattctcacctaaatcaaatacgatctgtaccggattctcttccgaacctttatcacttatctcgatgtatgacaaagtacttccggaacctacctccgccttacttgtcggccagaaattatcaaatagtctgcctaatacagattcttttccggagacatgttcactatagcctaccacactccacaaagatttattcagaattatgccgtagcctttcattccttgtctcacaacaatttctttttcaagccaagtttcattgtctacgagtgtaatcgttgcaacacgttccttccacgtcgaagtatttgcactgctcacagtaatctgaagtttaccgcttgcctcattcacctgcagccaatcgggttcatcaccatatttatctgctacggaataagataaatcgctgatctgacttacatcagcaattacttcgcgggatggtgtattatccgaagaaagaattatatcacttccttgcacataagttccttccaattcaacctttgaatccagtgaacctttgacaaccgtcaattttatccaattctcttccgcgtcagaaccaactttatcattcgtagttcccacacgtaccggaagtatccattttccgtccggcatttccaacggtttcaggatcagataattctctgcatatttctctccaaccggaatcttcacgttctgtgcatattcaaaaccggcagtcagcaaacgagatttttcatcttcagtcagcagattatcctcttctttatcataaccataagtaacaaccaattcttccgtcgtattgatatccaatttagctgtaatatctatctgacgctctgttgtcgctttagataaatccataaagacttctcctctttgttctcctacggcaccgtcaatcaccagtaccggttttctgatatccaaaagcagaataaagtgagatttatctacataaacatcctcttccggcgtacggctattgacagacaaaggaatataataaataccataacctttatcctgaagaagctgttctatcttcagactcaatggcacagctacctcatccgctccggcttcgataacaaaatcacgctcgaacgagtagtacttttcatccaacatctcgtaatcagtaccgttctctgtattatactgaaccaaataattataatccagctctacccttccggcaaatctattctgatagtagcccgccttatgaatccaaacgttgtatacataatcattggcattcatcacgtaaagggtttctttctgcaaatcactcttagggaaatatgcagtatctcccatcatgtaatcagttctagtatcagtacaagaagtccccaataaaagagccgcaaataaaaaacttatatatttcttcattgttaccatcttctttaccatttatagttttgtactaaatcttggtttttattaatcgcactttgcgggatagggaacagatagaaacttggtgtaaacactctcttttctattaccgtacgttggaagaaatcttccggatattcttccttgccgggagtacccttagcctgaatattcataccatgaatatcccctttttccgtttcttctgctgtcagccaacgacggctgtcgtagaagttgataccctcgaaagcaaattccacacgacgttcacgatgaatcaaatccctcaatttatcctgatcattcatagcttcaggatatgcttcctcaatattcttcagtccggcacgattgcgaaccgcgttccaataagtcaataaattcggatctttcagttcacccaattcaatagtagcctctacataattcagcagaatctcagcataacggatataaggtaattcacgttttacgttcttcgtaggacttgcttcatattccggcatggccagtttcaccatattatatcctgttgtaaagtgattgtgagaagcatccggaccattattcccatttttatacatctccagatagattttttcacttgcttttttcggaataaaccaagacataccgccatagactatcgacacatagaaacgaggttcacgacctacaaacatattataggttttccgctctttaccttcacatggatttgtaaactgagagtatccgacttcttgatatcctgcatccggatcaataatcggtgtggtacggtcatcatccgtataccctgtaatcgggaaacgtccggtttctaacatagcatacgcatccacaatttcttgagtaggattgtaacctcctccccaaccaccattactattaggcgcaagacgtttatcaatagtaccattatcttccaggaaagagaagatcatttctttattttgcgaagtagtaaatacggatttataagaagtataaggatcaatttcacccatattcgcaccactttcataaagtactttgaccaaatcataattaccatcctttataaggctcaaagcagcctgacgggccaactcccatttattcttgtcatacgtcaacggaaataacggagttccatccgcattacgaatattggcatacttagaattaccattgaactgtggactggcagattgtaagagaatacgtgccagataagctttagcaattcccctattcattcgagcataagtctcgccctctgactttaaaggtaagggagaattttctatcaaatccgtaaactcttctgtaatccattgcacacattcatcccaagtgttacgttcacgaaacatatccgtaccagagaaatccggctgttcatctttcaatagaatgaccggtccgtacatacgcatcaactgtgcatagtaataagcacgcacacaacgaatttccgctttccactgttcacgagtatcataggtcaaccgtggatccgggcatttatctacattctgaagaaagtatgtagcttcgcggatcgctttataaaaagtataccatttatcatattgtgcagatgaagcactccatacccccatatcaaaagtatgtacattggtataggccacatctacatcactagtactataagtatccggcatattaaatgggtatgtatcgcggatataagaatatactccgaacattgcgttctgtgtagacgagtaagtctcataaatctgttctggagaacgcaaatcctcgggagacgtatccaaaaacgaatcacaagatgatatagtcaaggctgcggcagccaaaaacataatacgtttcatatatttggatttcataatcaacatgtcttttagtattagaaattaatatttaaacctacattaaatacacgtgtcggcggatacttccttccatcaccggagcctagttccgggtcgaacagatgaacatccggtgcccaagtcaacaaatttactcctgatacatacagacgtaaattttgtatagccatcttctccatccatctctttgggaatgtataacctatttcagcattcttcaggcgaaggtaagccgcattacgtacccaaaatgatgatttcttggtattattattatccaaagcatcactcggacggattgtacgtggatagcgtgcattcgggttaggattatccacagtccagcgatcttccatcactcctttcagaaatccgttattatttttgtaaccggaagaaaaaggaaccacagcagaaccctcttcaaaaatagatacacgtgcagtcccctggaaaaatatagaaacatcaaaccctttccattctatagctcccccaaatccataagtgatttcaggaatatcacagaaaccaacaggcatcttgtcgtaatcatcaataacgccatcgccattcaaatcgcgatatttaatatctcccggacgtaaacggctatgattaccttcgctaaactgaatcgggctacggtcaatctctccttgtgattcaaacaatccgactgcctcccatccgaatttctgatagattttctgccctacagaattcatccatggatatttattcagagcatcgccattacgaagaatctcattgttcgcataagtaaatgttccacgtccagtcacattcacctgaccaattttatcatggtattctaatgaaccgtcaaagccccaactcttcattttcccgatattcaccattggtacagtagtcataccgacataagcaggaatattattattgcgtacaaagatatgatcacgcacatcatgataccaatctccctgaatttccagtttattaaataatcccaattcaaatccataattttgtttggtggaaacctcccaaccaacattgggatttgctacttcattcacacgctcaccactcgtcttagtatagtttccataaacataactacctgtattagcaactgtccccaaatagataaaacgaacatccccaccaatctgatcattacctacttgtccgacagatgctttcaatttcaattttgaaacgacatctgtcaatggcgagaagaacttttcattggatacataccatcccatagccaccgccggaaagaaacctacccgatgaccggctgcgaaattttccgacccattgtatccgaaatttccttctataaaatagcggctatcataatcataagtcaaacgtccagctagtccctgattcttataaggcaacgatttgatagaagatatattatccttataatctttatttctgtacgtttcatttttaatccgctggttatacaggaacaaacctcccacacgatgttttccaaacaagcgattataagtaatagaagcctctaaataggtcgcattatttcccccagacttattatcaaaccatggacctcctttggcagtttccggttctgagttgaatacaagttctccatttgtatcacggcgtatagcatgccatatttcatcctgttgcgtatatttattaccatgccatgcctgtgtatcaaatgcaaacttgatattagccttcaatccttcggtaatgaaagagaaatcctgatccagactgaccattgaatttaatgtgctttgccaatcttccacatatcctcccctagtaacttgccaataaggattcgttactcctttttctccaccccaatatccattggaatattgaatgggaaacgcgttcggttcaagagcgaatgcatatttccaaatatcatcagaattagcagcatccctctttttggtaagaaatcctcctaaggtcaatgaaagaaccgtagtaggatgtaaattaatatctacattcgatcgaaaattatagcgttgataatctggattaccattataagactctcctttgccggtcataaacaaaccatcttcatgataatagccggcagaaataaagtaacgtgcaatttcaccgccaccactcacattggcagtgacacgttgattgaacgtatgtttcttgaaaacagacttcagccagttcacattcggatacaagtctccgtctgtatgatttctatatttttcaatatcactttggctgtaagttcccggcacagcctcattatacatattggcaaaatccacagcgtccgccatttcagggattttggtaggagctaccatacccgcttccattttgattgaaattttcggcttaccctcagaaccacgttttgttttaatcaatacaacaccgtttgcgccacgtacaccgtaaagagcagtagcagtagcatctttcaataaagaaaagctttcaatttcttccggatcaagcaggtcgagcgaacgctctacaccgtcaacaagaatcagaggtgtcttattcgcaccaaaagtagaaataccacgaatccaaaattctgccgagctacctggagaaccatcacgctgaatagaaacaacacctcctaactgaccagccaaattggtagatatagaagcactgggaactttcagattactaacactcaatgtactgatagaaccaatcacactttctttacgttgcgtaccgtaacccactacctgtacttcttcaagcactgtatcatcggtattcatctcaataagcaaattatttgtcgagggggagatctccttttctatattagcatatcccaaatagctgattaccaatgttacggtcttaccccccggaacgttgatattgaaattaccatccatatccgtagtacctccgatactagtatctttcaaccacacactggcaccgataagagtctccttcgtattcttatctataatcttacctgctaattttctagtagcagccttcttcccttcctgaaatacttcagtcactgcacctgacgcatacgtcgatgcaaaaggtgccgcaaaaaaataaatgatgataagagcactaaccaagcgtcgtaatgagaaatctaacttacgtgcaatttcattcataatacatgatttaatgttattaatttaagtttgagatgttttagattgttgcaaccaatttctaaattcatattcgcaaagataagcgagagaatcttttttcatggcgaatcccgtacaaaagaacaagaatatcgtaaaactacacttttttcttaccgccataccaccgttttatttctatttgttcttaatgtgaacgattttatcgttaccccctaacaaaaaaaatgtctcatctcaatcgtcctgatataaaatcagaataattcagataagacacactaaatttataagagaagctatcagtgataactaaattttcaaatcacgtattttttctatttccagtcccgttatctgtgagatagtatcaaggggtatattcaaagacttcatatttcgtgccatttctttcttttcttcctcacgtcctttcgcaagtccttcttcaagtccttccgcacgcccctctgcacgaccttccgcacgctccgtaaatatattatctctcaatattacaatattatccaaatgccgataataagcttcaagctcggttttcgtcattttatcaagtttcaatcgctcgcgggcctcctccagtcccggtgctgtggcgctgtcagggatatcacctgtattcaaataacatatccactcttccaacgggctcttggctacctgattgaaatcattcactttcaatatataatattccggataaagttggctcacagcatctaccttgaacgtttgtctctgaaaaggagtcaactccagcacatcattctgatgaatacctctgaactccgtttttccgtgataaaccgtatcctttccgctacctaatgaaaaatagacaatattgatactatatattttacgtactttatcatagccttctccacgattaatgtattcggtcaccaacttggaagtgccgaacagcatacgttgaaaataagcatactcattattattctgaacttcgatcagaataagctctcccttagagttttcggcaagcatatctacccgattatacttgtcaaactcgtcctcttgattgctttcgctttccaacaacttctgaataacaattttttcattgagaagtgttgtcaaaaagccctcaagaactgcaaaattggctttattacgcaataagcgcttcatagcccaatcgaaacgaatataattacttgccatagactcgtctcctttctcgttatcttttttcatgcaaacaaaggtaagcagaaaatgtttaatatcaagtatatatatccaataaaatgatttactatacctttatatatactaccgaacgccccactccatacttcttcaaaacaccttgttcgatgaaagcattaatatcctgcaatgcctgtgttttcgtttttccaacgagcagggcataatcctgccgattaatgcatgggtgctcttttagaaacctttctaaccgttgcaggcacttttcctctggcaacggatttttcacacgaaagggtgaatgataacgccgtaattcaagaccactctcaatatccttcttaaattggcgattcacacgaaaattaatatctttcagagatatagacggcgaacgcaattcttttgcctccttcaccttcttgtcaacactcaacgaaaggctaaaataaccgatatcccctaattcaacagagaatccttttaaaagcaaatgcctcaattcttttgatatagcctctatgatacccaccacctgcgcatggggcatatgctgaagcgcagtcacttgttctacaaattcttcggctgtataacttcccttcaacactacacgtgcatgcaaaggctgttcttctccgcttttagcaaggtcgggagtttcataaagatcataatttacactcattattgattagttctttattaggagagataaacatcttccctcccatagatttattttctaaagtacatttctattttcgtttgacttaactcaagcgatagttcaacttaagtcattctttcgtttaacttaagtcaaacgaaaacaaacatactaacgagacaaatgtacatagaatatacagatactaatctatactaaccgagatttaatttcatccgataaattattccaaagagcataaacatattcaccagtaattatccaagatttgaacgatttttttgttcgttttcaaaagttttgttccaccgccaaaaagattgcctatcatttgtttatgcaacttattcttcctaatattgtcctatactaatgaaaaccaatacagataaaacgaatccccatgcaaaaagtatttcttttgatagccatacaaatcctgtgcttacattcattcgtggtgaatgcacagcgtattttctccacctcttatacaatggatgatggattagccgccaacagagtatacagcattttgcaagattcatgcggatttatgtggttcggaaccgatgacggcttgagcaggttcgatggcatctcattcaagaactactatctatcagaatatatcaacgcaacaaccagtaacagtgtcaagaaaatatttatcgaccgcaggggcagaatgtggataggattggataccggaatcgtcatttacgactcgaagacagacactttccaacctttccatgccaaaactgaaaccggagagatgatacgaacatacgtcaccgatatgatagaggacagcgacggagaagtatggattgcaacaagcggagaaggactttaccgtttttctccccatgatgaaatcaaactcaaagtctatcggaatattcccagagaaacgaacagcatttcgcaaaacatcatcatgacattacagcaggacagcaaacaaaacatttggataggtacttattcagaaggtttatgttgtttcaataaacaaagtaacacgttcgtcacttacaaaaagagcagtcaccctaatagtttatcagataattccattcagaaagtgtttgaagactcatacggcaatttatggataggaacttttcagaacgggctcgacctgttcaatcctgtggctaaaactttcaccaactaccaggacagaagtccaaacaacctattatatcatatccacgatattaaagaatacagacctggcgagttgttcatttcatccgacaacggtatgggaatttttaaagcagacaaaggagaaattatacaatccgacaatccgaatctgaaaataagaaccggagccaataagtttatatataccatctatatagataaggaagaaagcctctggctgggctcctatttcgatggaatcaaattctattcggcatttcaaaataatttcaaatattatagctgttcatcatcgtccacaccacaatcaggaaaagtaatcaatgttatcaaagaagacaaagatgataaatactggataggtacggatgacaatggcattttccgatttgatgccaaaactcaagaaattacccctttccgggatgcagccagtataggcacaacttactattgtatacacgatctgctggtagacagagataaactatatgccgccacttatggaagaggtttggaggtgattgatttaaaaacaggaaaagtggaaagttttctcaataacccggaagattcaacatctatcccctcctcacgggtattcactctatataaagccagtaatggatgtatttacgtgggcacctctgcaggattctgttactataaccccgaaaaaaacaatttcatcagaatcggttcttttacaggcaaaatatcggatatcattgaagattacttcggaagaatatggataggaacaagtatcagtggattatattcatacaatgtcagaacccaaaagataacatcttatcaacgttcggatcatccgaattcactaacaaagaatgtaatcaccacgctagctatcgacaacaagaaacgactatgggtgggaacttatgggcaaggactttgtagatataatgatgaaacagatgattttaccagacacgactacctaaagttgccgaataaaatcatcacttccattatccctaaaggagacttactatggattagtaccaataagggacttgctgtatataatccggatacagaatatctgaaaacctattcgaaatcaaacggactatacaatgaacaattcacaccatgttcaggctttgaatcttctgacggtagactatttttgggttcgacagacggtttctgttatttcttcccgcaagacttaagagaaaacacatacaatccacctgtcgtcctcaccaatatgaccattttcggaaaagagatacaggctgatacatcccattcactcattcgccaatccataggatatacagatgagattgtgttgaaatataaccagtccatgatcggattcgattttgccgcactaagttacattgctcccgaagagaatgattatcaatatatgctggaaggtctggatagcgaatggcagttcactaaaggaaataataaccatctttcctatgcaaacttacccgtcggtgaatatgtattaagggtcaagggaacgaacagcgataaactatggagcaataatgaagtacaactaaaaatcaaggtactgcctccattcttccggtcgcaactggcttatctgatctatgccctcgtcctgttgattgcgattatgttaaccgtatggtattacgtaaaacgcacggagaaacgtcagaaagaacgtatcaagaggctgaacgatgaaaaagaaaaagagctctataactccaaaatagatttcttcactaacattgctcatgaaattcgaactcctttgagccttattatcggcccattggaatacctgatgaaaacttcaagtatcaacaatgtgtatggggaatacctaagtattattgaacagaattacaaacgtttgtatgcgcttgtcacccaattgctggatttccgcaaagtagatacgggatcttataaactatcgtatgactgttaccggattaaagaaataatctgcaaagtaacctgtatctttgaattatctgccagacaaaagaaagtggcgattgacacttcctctatcccggaagaactgagcatcgtcatagatgaagaagcttttaccaagattatcagcaatctactaagcaatgccttgaaatatgccaaaagcacgattcgtattacgactatagaaaaggattccgagatagtagtcaccgtgaccgatgacggtataggcatcaccgatcaagaaaagactaaaatattcgacgcattctatcaggttaagaacaacagtgaaataaataaactgggcattggtatcgggcttcacatgacacgctcactcgtccaattgatgaacggaaagatcgaagtcagcgatagggaagacggtgaaaacggtgtttctatttctgtatatttccctaagcaagcagtcatcactgcggcgctacaagtaacaaaacgggtagaagacacaattattcctgaaagcagcccaaaaaatatagaagaaaatgaactggaaagcactcttcccggcgaaccgttgaaaaaacaatatgccattatggttgtggacgacaacccggagattctggatttcctttccaaaattctgtccgaggaatattttgtcatatcggcttcgagtggagaggaagcgttgcaaatccttgaaaagaataacattgacctcatcatcagtgatgtgatgatggaggaaatggacgggttcgaactctgtgggaaaattaaaagtaacatcaatatttcccacgttcctgtcattctgctgacagccaaaacggatacggaaagtaaaatcaaaggactggaagccggtgcggatgcatatatagagaaaccattctcacctttccacctgaaagcacaattgctgaacttactcaagaaaagggaaagtcagcagaaaacgtatgcctctactccgttgtccgatctgcactccgctgtccacaataaactggatgaagaatttatgaataaatgtaccgaaatcatccagaataatattgaggactccgaattttcggtaaatacactggcacaggaactgggaatgagccgtacctctgtatttaccaagatcaaaggcattattggtatgactcccaatgatttcatcaaggtcactcgattaaagaaagcctgcaaaatgatggtggagggagaatatcgggttaccgaaataggattcctcgtcgggttcagttcttcttcctactttgccaaatgttttcagaagcaatttggaatgttaccgacagagtttctcaaaaaaataaaagaagccccctcatccgcaacaaaataagtcggcaagcattctccctctaagctaaatcttaagattttattaaattctccttataatataaggtaaggagaatctttttttttacttttgtccccaaatattatggtacaagccattctaaaagaaagaattatgcagaaaaaccttgtcattgtcgagtctccggcaaaagcaaaaacgattgaaaagtttcttgggaaagattttaaagtcctttctagttacggacacatacgcgatctgaagaaaaaagaattcagcatcgacgtagagaagaattttacacccagctacgaaatcccggcagacaaaaaggctctggttagtacactgaaagcagaagcaaaaagcgcagaaaccgtatggctcgcatccgatgaggaccgcgagggggaggctattgcctggcatctgtacgaagtcttaaaactaaaacctgaaaacaccaaacgaatcgtatttcatgaaattacaaagagcgcaatcttaaaagcaatcgaacaaccacgcgatattgatctcaacctcgtaaatgcacagcaggcacgacggattctggaccgtatcgtaggtttcgaactttcacctgtactctggagaaaagtaaaaccggccctctctgccggacgtgttcagtcggttgctgttcgtctgattgtagagcgtgaacgtgaaatacatgccttcaagacagaagccgcttatcgcgtcaccgccatattcctcgttccagacacagatggcaagtcggtggagatgaaagcggaactgacacgtcgcatcaagacgaaagaagaagcaaaagctttcctcgaagcttgtcagggagctacttttacaatcgaagatatcactacccgtccggtaaagaaaacacctcctgcgccgttcaccacttctacgttgcaacaggaagctgcacgtaaattgggatacaccgttgcgcagaccatgatgcttgcacaacgcctgtacgaatcgggatttatcacttatatgcgtacggactctgtcaacctttcggattttgcaacaataggaagcaaagaggctatcattaaaatgatgggagaaaactacgtacatccccgtcacttcgagacaaagaccaaaggtgcacaggaagctcatgaggctatccgccccacctatatggaaaaccaatccatcgaagggtcagcacaggaaaagaaattgtacgacttgatatggaaacgcaccatcgcttcccagatggcagatgcggagctggaaaagacaactgctacaatcagcataagcggtaacaaagatgtattcacagctaccggcgaagtgatcaagttcgacggattcctgcatgtataccgtgagtcctacgatgatgacaatgaacaggaagatgaaagccgcttattacctcctttgaaaaaaggccagcgactggaatacggtcctatcatcgcaaccgaacggttcactcaacgcccgccacgctacacggaagcaagtcttgtgcgcaaactggaagaattgggtatcggacgtccgtctacgtacgctccgacaatttctactatccaacaacgcgaatatgtggagaaaggaaacaaagatggggaagaacgcctgttcaacgtattaaccctgagagaaaatcagattaaagacgaaaatcatactgaaataaccggtgcggaaaaagcgaaattatttcctacggacacaggtatcgtagtcaatgatttcctcactgaatatttcccgaacattctggattacaacttcacagccagtgtagaaaaggaatttgacgaaattgcagaaggagaagcgcaatggacttccatcatgaaaactttttatgataagttccacccgtctgtagaaaatactctggctatcaagactgaacataaggtaggagaacgcatattgggcgaagatccggtaagtggcaaacctgtttcagttaagattggacgtttcggtcctgtcgcacagatcggcacggcagatgatgaagaaaagcctcgctttgcacaaatgaagaaagggcagtctatggaaaccattacattggaagaggcactggaattgttcaaattaccccgtacattaggcgaatacgaaggaaaaacagtaagtgtgggtgtggggcgtttcggtccttatgttttacataacaaggtatatgtatctctgccgaaagctgccgatccgatgaccatcactttggaagaagcggagcaactaattctggaaaaacgccagaaggagatggaacgtcacctcaagaagtttgaagaagaaccggaacttgaaattctgaacggacgttacggaccttatatcacttacaaaggttccaactataagattcccaaagatattgttccacaagatttgacattgaagagttgcttggaactaatcaaggtacagaacgaaaaagagcctagtacaaccaagaaaagaaaaacggctccaaagaaaaaataaacggaaaaaggtgttgctctgataatcattacaacaccttttcccgtttataacatattgttcaagagaatattacattctggcaggaacttcaatacccagcagtcccattcctaaacgaacgactttagccacattggcagaaagagcgatacggaatactttcaccgcttcattctcttcacgtaaaatactgaagtcatgatagaactgattatattctttcaccaaatcgtatgtatagttggcaataatagacgggctgtaatcttcaccggcctgcttcacaacggctgcaaaatcagctaccatctgaatcagtccttcttccttttcactcaattcgattcctgcctggatttgttcgggaacaacaataccggattcggccgctttccgcagaaccgattggatacgcgcgtaggtatattgtatgaacggtcctgtattgccattgaaatcaatggattctttcggattaaatgtcatattcttacgggcatcaaccttgaggataaagtatttcaaagcacccaaccccacaatacgggcgatatcatccgcttcttcctgtgtcaagccatccaacttgccaagctcctgtgaagtttctttagcggtagcgatcatctcttccatcaaatcatcggcatccactactgtgccctcacgggatttcatcttaccttccggcaattccaccattccgtaagagaaatgcaccagactctttccccactcaaaacccaatttatcgagcaagatagaaagtacctggaagtgataattctgctcattacccacaacgtaaatcatcttgtcaatcggataatcagcgaaacgaagtttggccgtaccaatatcctgtgtcatgtagacagaagttccgtcaccacgaagcaacagtttgtgatccaatccttcggcagtcaggtccgcccatactgaaccatcttctttcttgaagaagaaacccttctcgagcccttccatcaccttctcttttccttcgaggtaagtattggattcataatatatcttgtcgaagccgacacccatcatcttgtaagtctcatcaaatcctgcatatacccaattgttcatcatctcccacaatccgcgtacttccgggtcaccggcttcccacttcaccaacatctcacgggcttcctgcatcaacggagattccgcttcggctttcgccttcgcttcttcatcgttcatcccctgagctgtaaattgagccatcagttccttcacttcggctttataatgcttatcgaaagatacatagtagtcacccaccagatgatcgcccttcttgcccgaagtctcaggtgtttcaccgtttccgtatttcttccatgccaacatggatttacagatatggataccacggtcgtttacaatatttgttttaaccaccttgttgccgttcgcagccacaatgttagccaatgcgttacctaaaaggttattgcgcacatgtcccaagtggagcggtttgttcgtattcggagaagaatactcaatcatcaccaatggagaagtctcggtagcctgcaccaacccgtactgtccatcggcttgaatctcattgagcaactcaatccatgtagccgacgcaatagtcaggttcaagaacccttttatcacattaaaagcagctacagccggttcgttggctttcagatactcaccgatttccaaggctgtctgctccggtccttttcttgacattttcaggaaagggaacacgaccagagtcagatgtccttcaaattctttcttcgttttttgcaactgcaccatcttttcagggacttcctgaccgtagagtgctttgagtccgttgatgacggacgctacaagtttatcttctatcttcatatttacaattattttctgcgtacaaagatacaggataatttataaaggttgctcttctgaagaagaattattcttcgcaccacgctgatatatagaaggtgagactccgaattgcatcttaaaacgtctgctaaaatagaacggacacaccaatcagtataatcttaaaaaaatataagctcatcacctccatcataggtttaggaaaaatacaatactatcaggaaggtatgcaataatgacttttatttcgttgaaactatttttcagcatattaaccattcattaacatccttttcttcaactataaagccctaaaagcaaataaattcatatttttgtatcacacaattagttgattcatgaaaaacaaaacttttctcctaaccgtctttttgaccgtattaacatacacatcactactggcatcagtcgagatacaatcgaagcgcctgaccacctctgatggtctgtccaacaatacagttcgccatatttatcaagatagcaaaggttttatctggatgagtactttgaatggactaaaccgttatgacggaaattcattcataaccattcaaccccggaatgatctggacatatacctagcagaccatcgcggtaaaacactgaaagaagatcagaacggttttctatggatatcaactgcagctgatctttttagttgttatgatcttaaacgtgactgttttgtagactttacaggatgtggggaaatgctgcatccatatagaaatatatctattttcccggatgatatttggttatggggtattaataccggctgccgcaggataacctaccaaaatggaaagttctcttccgaaatattcaatatcaatagccaccatcttggttctgataacattcgtttcttatcccaagatacagatgggcgtatatggattggtacaaccgagggattacactactatgaaaaagggaaaatgaaatgtgttaataacacacattattttcaatgggcgtgccattctgataaaaacaactattttatctcatctgaaggcttaatatggggatatgactcccgaaaaggactttatattgttgcaaacattcccaacatattttccgaacgcgaccttcccggtgtactccaattcaatgagaaatggattatttttacatcccaaaacacttattctctagatacccagactcatatcctcactcaagcctcttccgaactaaatattcccaatgggcaggtcataaaagataatcgggataattactggatttttaataaaaccggaaacctgcattacctaaatgcaaaaaccggaattataaaaacatttcaacttatgcctaaaaataaagtaggtttcattgatatggagcgttacaacatcatacatgactccagagatatcatttggattacaacttacggcaacggactttttatgtacaacttaaacagtaatgaacttaaacacattacatcaggagcaggaaacacagaattgataaaatctgattttcttctctccataatggaagataatgcaggaaacatttgggtaagttccgaatttaccggcattacgtgtcttaagataataaacgagggagcccaccgtatatatcctggacaaaaacaaccccacagagactattcaagcaacataaggttaatatcatcacagaaaaatgggagtatatggatcggaaaccacgatggctctatatttgtatatgactctctcctttctgtgcaaaaagaagagtatcactatgattccaacatatacgcagttgccgaagatgcatcaggaacgatctggaaaggaagtcgcagcaatggcatctacataggaagtaagaattattctcacgatgaaaaagacataacctcactttcattcgatgaagtttttgatatcttaaaagatagcaaagggagaatgtggataggcacattggggggaggattaaatctcgctgtacctgataaacaaaagggttatatttttcgccacttttttaataagatctatggactgaaacaagtacgtagtttatgcgaagacgccaaaggttggttttgggttggaaccagtaaaggaattattgtttttcatccggacgaacttctcaagaatccggacaaattttatttatataactggggggacaaacaccttcaaagcaatgaaataaagagtgtgaaacaggatagtaaagggaatatctggattgccgagtccggtgccggatttagcatttgtactccggaaaatgattacagtaaactccatttcactcactatggtgtcgacgacggcctagtaagtagcatggtacagggatttgtcgaagatagcaaggggctaatgtggattaccacagaatatggaatatcttgttttgatccgaaagagaaaacttttcagaattattttttctccagtgatatgttaagtgatgtatacagcgaaaatagcacactcaaattgcaagacggtcggctgattatgggaactaatcatggtttggtgataatcaatccccagcgagtcaaaagtattctacacgctccaaccgtaacctttaccgaacttaaagtaaatggcatatctattcgtcccggtgaccccgactcacctatcgatcgttctttagcatacgcagagactatccatctccgctattctcaaaattcagtgatgattgatttttcgacgctggatttttccggttctgtacacccaaaattcagttataagctacagaactatgataatgattggagtattccctctcatgtgaattttgcggcatataaaaatctaagtcccggaacttattacctacacgttaaggcttgcaatgcagtcggattatggggaacacaagacgctgtactgaaaatagttgttacacctcccttttggcaaacaacctgggcatttcttctttatgctttgttcgttgtcatagttctatatgtcgtttatcgcatcatacataatatgaacgagctccgatacaaaatgaaggtcgaaaagcaacttaccgaatataaactagtatttttcactaatatctcccatgagttccgaactccactgacacttatccaaggtacactagaaagaatatgccgtaatggcattccaaaagatttggtttactccataaaaataatggagaaaaacacaaaccgtatgttaaggctcatcaaccaattattagaatttagaaaaatgcagaataataagctggctctttcgttggaagaaaccgatttagtagcctttctacaggaaatatacatgagttttaaagatgtggccgcaactaaacggatggatttcaatttcataacaactgtggcttcatataagatgtttttagatgaaggaaaacttgataagataatctacaacttgctctccaatgccttcaaatatactccttcaggaggaaaaattgattttagtatttcaatagacgactatgcccggcaagcgactataaaagttattgattccggggtcggtataccaaaggataagcaaaaccaattattcaagcgtttcatacaaagcagtttctctggcagtagtgtcggagtcggacttcatttaacacatgaactggtcaatgtacataaaggtacaattagttatgaagataatcctaatggaggatcaatctttaccgttatcctttccacagactcaactatttataataaagaagattttctgattcccggcaatgtattgttacaggaagaagaaattcttaaaaaacgcatagtagcctccgcttcctgtcaaaaatcccctgaatccattctagcagaggataacaaaggaaccgaaattcaacaagtaggcatattacaggagacaccttcaaataaacatactatactaattatagatgacgatgatgatgtacgtgaattattaaaggaagaattacagaactatttcgaagtagccaccgaacccgacggagagtccggactcgaatatgcctctgcccatgaagtagatttaataatttgtgacgtaatgatgcccggatgctctggatttgaagttacacagaaaataaagggtgatttcaaaaccagccatataccaattattctgttaactgccctaagtaatcctcagagtcaactggagggggtagatagtggtgccgatgattacattacaaaaccattcagtttaaaatacctgctggcacgtgtgtttaacctgattgaacaacgagataaattgcgcaaaaaattctcgagtgatcctatgatgatacgtccttctatatgtaccaatgataaagataaagagtttgtagaaaagctcatccggataatggaacagcaactggagaatccagattttactgtcgatgatttcgcatcagagatggcactgggtcgtactttattctataagaaagtacggggagttacaggatatagccctaaagaatatatacgcattatgcgaatgaagaaagcagcagaattgttgggcacctatacagtatcggaagtatcttacaaagtagggctcaatgatccttcctattttagcaaatgctttaaagaacaatttggcattgccccttccgtgtatcaaaaaaagattaataatacggaagaggtatgaccttatcgcaaaaatcagcggtatccaatataccacaagccggtcaactgaatcgtttaaaacagttgaccggccaaaatatttcatatatctgaatacacatctgtaatacaatacctatccggtttcaataggaagcgtgtcgttcacttatatttatttttccaaacctcattccattttttctcccattcttccttatctttcgcatctataaaaggctggtctttagctggaaaagcaaatccttctgcggtgaaatcagttttaacgaaacctattttctctctgaaatgcgactgcgaatcattaccgaaataactacaccaccaatttccctccttatctttgaagaatccggtgccgccgccacacggaatagactcatgacgttttttgtaaggtccgtaaatatgatctgacatagccaaacaagttgaatacctcccttcataatcatcagctgctcccaaataatatttcccatctcgtttaaataatacaacaccttcgtgtccaagatcgttcatcccccgtttcacacatttttttgcatgatgtgtagggtcatgatccggatcatcgaatataatttcacgcatcggttcggcaaacccactcatatcatcttttaataaagcaatccgagtggcaccaccatagctgaagtaaacttttccgtcttcatcttcaaataaagtagcatcgataccattagctatccgttcatttgtatgaaaagcattgacgtacggtccttctggttttcctgtgacactctttaataaaccgataccgtgtggacacatactgaaacatataaaatagttacctttcacatagtgaatttcgggtgcccaaacagctcgaacggctctacgcggatagtcacgccattcttttacccagtcgtcagcatccctgtcaatatcccagacaagtccaagatattcccatgatatcaaatcgaccgatttccacagttctattcccttggtatatgcccagatattatctcccgaagaccctgtcaagtaataatttccgtctccgccaagtgttactacgccatcacgcaggtgtaactctaaagccggtttaataggtggcacaagtcctttgtctaccgcagtgccctttgctgcattaccaaagttaagatcatattccggtttgggatggttacctttgtaacgtacgccttcccatccacttctccatcctccacgtccatctccaaccacttttcttcccggaccactaaccggagaaaactgagttgcccattccatatcttcttttgttggaataaacttttcttgtgccgtaacaaaaagattttgcagcaaaaaaaacatcgacaatagtaaaaaaatcttcttcattgtgtttctatttattagtttacatatttatttttccaaaccttattccatttttgttcccactcctgttgactatgagtatcgagttgaggttgattttttgaagggaacacttttccatccgcagtaaaatccaccttaattagccctggcatttctctgaatggcgattgattctcgttcccgaaataagtacaccaccactgaccgtcatggtctttaatatacgaagtgccgcctccacaaggaacagcttcatgtctccatctatatggtccgtagatagattcggatatagcaaccatgctgctatatctgccttcataagagtcggcagcagtcaggtaatataaaccattacgtttaaacatgaaagcaccttcacgacctatatcctggcagtttctacgagacagacaagtgcttgcatgatgatttgaattcaaatccggatcaagcagaatcggcttaaccggtttttcagccaagccactcatattttctttcatacgagccacccaacctcctccgtaaatcaggtatacttctccatcttcatcctcaaataaagaagcatcaatatccgtcccccatcttccatcattggtcaacgcattaatataaggaccttccggcttccctgatgagctcttcaataggccacggtctcccggaggcatacttatagtgatataatagttaccttttacataatgaatttcaggtgcccacaatgccctaacagctttatgatgaaaacgccatggcttttgccaagtaccatctttttcaaaactccatacaagtcccatgtagtcccactctctaagattttccgacacccacagttctactccatcattgaaatgccaaatgtcactacctgtagaacctgtgaggtagtacctcccgtcaccacctatacaaatcacagcatcacgtatctgtgcgtcaaataatggtttgataccaggaataagcccctcctttacagcacttcccatattttccttatccgaattatattctagccactgtaagctcggtccgccaatggtagtattgtctggcccgcttattcccaaatttatgttacgtgcattaccttgttttgcggtaacagtgaagtttttagtttccacctggaaataaacagaatcgctgcctaaaatcatctcgcacatagtgacatcattcggaagcctagatgacattacccttactttaatgttatcaccttctgaaatcgaactctttccttgaatccaattaccattattcacgttatattccccattgttcaccactatcgaatctgacaaagatgcttgaattacattcgactcgatccaggttgaaggctccacatctcttcgttcgttaaaagctatccgcttattttcatcagtgcatgccatcgcaaataaaacgaaaagtagtcctgataaattgttttttaaatgcataggaaaaataattttcataattatttattttagtcttatcatagtatatacgttgtaaaaaatctcggggcaaaattaggatatatactcatcagaaggctgaagttatatccgttaaacttgcaacaattcaaaaactacaagtactgtacaaaactaccaatttcgctgcagagaatgtctgagcgaggttatgtttcttttctgcagctgtatacaattacctgtaaattgaacattattccttttcgtttagatagcattcccatacctttgcgacagatattcactccgaatctaatatctattaaatctttaaaaatatatcatttatgaaacacatgtatttaacaacagctatatttacttttgtaatattggcaggttgtagcaatgatgattacagcggaccggatcggccgggcataaaagctgaaatttggggaacaatcaacaacatcggtacacgcgccagtggaacttcttggggagcaacagactgtataggggtaagcgtggcgagtgatgaggttaacatcaagtatcaatattccggcaatgattccaaaccttttagaacagtggaagaaggcagtgatatttttctaaaaggaactgaagattcacaaacactcacggcctactacccttatacaggaacaaatggtacagcacccggtatcattaatgtaagcacagttagtgagaatcaaactaccacaaaacaaccggaaattgacttcttatttgctacagcaacagggtcgcgtgagaatcctgttgtaaattttgcttttacccataaaatgagtaaacttgattttaatttcaagaaagaaaatcctgaagaaattattactgacggagaaattcaattttcattgaacggtctactgttaaacggtacatttgatacagctacaggaaaaacttccaccggaagcaataccggagctataaatcaaaccataacgaatggtactacctcattgatcttattaccgcagacacgcaaaaatctcctattagaagtagaatacaacaataaatactttgttgctacagtaagtacaatggaattgataggagaaaaagtacacacttatacaattaccatcaatgatcttgccgagataccttctctaaccatttcttcgggcagtattactgattgggaacaaggcaccggaggaactatagcaaccgaggaagacaaacaagaaattaagccttcaaccgatccctcgatatggggtgatagtggaaaaggcgaagacatttcctcttattaaagattcagccacaaatagttgaaaacaacaataatcttaaattaaataaataacagtatgaaacagaatagacttatacaaaatataatattgctaattggttgtttactcttaaattcatgttatcaaaacgaagaatatatgcaaacagtccaacaaaatcaccttttaattgatattaaagattccgggatttatagtaatgaaccaataagtcgtgccaatacagttggttatacaacaactttctcggaaggcgataaaataggcttatatgcagtcaaaaacggagagattctgcctgatgtaaataatgtatgcttatcatatactgaaggtaaatgggtagccaattcgtcgatatcatatagtgaggataaagttggggccatatattatgcgtattatccttatgatcaagcactaagcacctttaataagactagtaccgacccatttgaagctcttgtaagttcatgggaaatagggaacgacttaaccggagacatatataccggcaaagatttgatgacaggttttgctaatgcaaaattggaaggacgaaattacacattggatttgacattgggacaccgtatgtcattggcggtgattaaattgcctaccacaacatacaattttacaaatgcagggatgagttcatataatgtttctccacagaacatttcattcacgattggaaaagattccgaaagcgaagcgcccatccttccgtattatgacatcacgtcggatacatatcgcattctgattcatcccaatacagcatatacactcaaaggaaaattcactaacggagcaaatgcaaataaaagctatactattaatattggtactgacattgacaaagctcaatatgctcaatacattgttgatcagcccgagataataaattatacattaaatataggtgattattattgcgcagatggctctttagtatcaaaagatggtcctgcaccaagtaactgtattggtgttgtttatcaagtaggaaccactgatgctataaagaatgattatccttcatgtaatcatggtttggtttatgcattgaaacgtgtagaaggagatcctataaaatggtcaactagtaaaccatcatctactaattggtatgaaaagtacgggatgctattatataatgcaacaggagtagacatacaaggatatgaggaaaccaaaacatggatggatattgaaaccggagaagtagaaggagtggatattaatagtataatgaaaagcacattaaatgactatagacaaaatttcattttaccatcgacgactaccgattggtatttaccttcttataaagaattggatgcacttaataataatgcaacgattttgaatacacaattcagcaaagtcaatggcgaagctttatggacgagtgcgactaaggacatatcttattggagtacaacaatacgccgtcaggatgctgtagtacaatatcatcccgataataaaactaaagctgggtatatacgtgatagttcgggctattatcgttactcatttggattctaaaataaaaattatagtaaaataaatattaaaataagattcatcatgaaaaaagtacttttaacaatggcattgtttgtaatagcatcgttaagctatgcacaagttctgaaaaataatttcctggcaggatataaagtcggcgacaaactggaaaaggctgtctatatggataaaactgatccaataaagctagatacctggtgtagaggttttatgcccacacctgtagaaggttatgaaggccctctagtaggtgaagaattatcttatccaggttatcacgagggtggactttccatcaagttcggaaatcttccttatggcgcaaaacctatctcggtatactcaatggataaaggtaagaaatttaatggaggaacactttatttttcttttctagctaatttttcccaattagaaggaaacggaattgttgatttcgttgcattgagccctaattatgtaggtggttcagaccgtggaatagtatgcgttggtcgtgaaggaagtaacaaaatccgttttggtgtaggattagtaagaaaacgagtggaaggcacaacagtttatgattacaacaaaacatacttgttggttattaagcttgattatgaaaagaatgaggcttcattattcattaatcccgacttgagtggtgaagagcctaaagctaatattgttacggatggcggagagtatgtattggagcatcccatgcgttcagtatctttcagaaaccggtatggctatataggaaatgttggtaacttccgcttatcaaacagctgggctggagttacagcacaataatattgtttttccaaaaacgagaatccccttctttttagggcactgtatctaataggagggggatttatatcttctgttatcatttaattttcattgttcatcctatcagaataatatgaaaaacaatctatatctatctaaacttcaaaagaaattatttacgttaatccttttggtaagcatactctctttatattctataggagtatcagcgcaagaccgaatggtgaaaggtacagtcattgatgagaaaaaggaacctgttattggagctactgtcatcataacaggtacatccaatatggccgtcacaaatctggatgggcaattttctgtatatgctcccaataatgcaaaaaccatagaaatctcttatgtcggttacaaaaccgaaatattacctcttaagggaaaaaatgtttttaacatacaaatgaaagaagaccatttggctttggaagaggtagtggttattggatatggtactgccaaaaaagggaatttaacaggttctatagccaaagtagatgcttcaaaaattgaagaccgacctgctacaaacatagcttctgcgctgcaaggacagttgagtggcgtagaaatcagttccagtacaggtgctcccggtgaagaactgacaatccgggtaagaggcgctgcatcaattaatgctgatgcaactccactatatgtggttgatggtatccctactgacaatttggggagtatcaacccaaatgatattcaatctattgaggtactgaaagatgcatcatcttcagctatatatggttctcgcggggcaaatggagtaattttgatcacgactaaaacgacaagtaatacagataaagtcagtatacaattctcggcagcattcagtatgcagcaaatagaaaaaaaggttgatatactaagtccggaagaatggattcaattcagaacccggtataatgatggaagatatatgaaacaatatgccggacaaggtgctaccattaatgatgattgggaaacacgtctggctatgaataacaatagagtcaattattatatgatgaatgaccctcgctggacacaaccaaactatggtggattggccatgattgactggcaggacgaatttttccgtttggcacctatgcagaactatcagctttccatatccggtggaagtgataacacgaaatatcgtgtatcattaggttatattgatcagcaaggcattgcaattgaaactcactataaaagattgaacatacgttcaaacattgaagcaaaattattcaaaaaattaaaagttgggattaatatcgcccctacaatttcgtggaacgatggtggccgcatcgacggtaaagaccaacaagcaaaccgtgcgttaacaatggtacccatagcagagccggaggctggattaaacgcaggtgccgaaccttatgccagatataactgggcgggaaattttattagtcctattgcatatatgaaacaaacgactaatcatgcagagagtatgtatttaagcagttcggcttatgtgaaagccgaacttatagatggtttacaggcaaccgcaactgcatcgtatagctttatcggcaatcagaaccgttcttttactcccagttccgttacttccagatggaccgatggagaggggtatcagacaacaggtaatcgttcagattcccgtacccataaatatttgcttcaggtagtaatgaattacgataaaaaattcgggaaacacaccgtaagcggtatgttgggatattctatggaaagttcaaatggatcttccagccgaatatcagcaaaacaatttccggataattcattagagatcttcaatgaaagcgacatggctatacaaatagccaatgccaacatgacaactccaatccgtttgctttcctactttggacgtgcacaatatgaatttgacaatcgctatttgcttactgccagtattcgtcaggatggttcctcacgttttggcaagaataaccgttggggaatatttcctgccatatcggcagcttaccgcatatcgaacgaaaaattctggcctgaaagatttgtaatgaaccagcttaagctccgagccagctggggtctgaatggaaacaactccataccgtccaatgctgcgttaggaattatcagtagcgcaaactattctgtaggtggaggtatgacgaatggttttgctccgtcttcaattaacaatgaaaatctcggttgggagaaaacacgaagctggaattttggaatagatataggcttttttaataacagaataagtatatccgctgattattataataaaactacaaaagatttattatatcaggtatcaatacctgcatctatgggattttctaaagcatggggcaatatcggtagtattaataacaaaggatttgaagtggagttaaccacacagaatttaaccggaacattcaaatggagcacttcttttaatatgtcttacaataaaaacaaagtaattagtttgggagaagataacagtaccgtatttacagggtggagtgattcaaatactcaggcgtttatggtaggacaacctctaaaagtctattatatgtacgatgctgtaggagtatatcagtatcgggaagatcttaaaaagtatcctaaaatggagaatacagtattaggcgatgtgaggtatcgtgatacaaatgatgatggaattattaatgacaatgaccggacgttggttggtaaaccgagtcctgactacacttttggtatgacaaatacatttaaatataagaattttgatctttcatttttgttaaccggccagaccggaggtaaaattttcagcttgttgggacgctctttcgaccgtccgggaatgggagcctctataaatgtattatcgcattggaaaaatatgtggatttcggaagataaacccggagacgggaaaacgccaggaatagataatgctaataccggaactttttatgatacacgttggctttatagcacggactttatcaaactcaaaaatgttacacttacttatagaataccagtaaaaaaggtagacgtatcagaaatgcccgagtatatatatcaggagaaaatctttttatgcttgataagtatgatggaggattctcgcccgaagccaataatggaggtgcgagtgccaattatgattatggctcatatccgcaagcgagaatatttactttaggtggaagtattacattttaaaggaaggagagtataataatgaaactacaaaaatatatcataggtggagtaatagcatttagtttattgttttcttcttgcaatgactggttggaagttgaaccggagaacacacgtacaacagattatttttacaagacaccgagtgaaatgcaacaggctttaatgggcatctataatggtctgctccctatatcaaattattcattatttatgtcagaagtacgttctgacaatgtctggacaggcgatttaacagataaacaaaaagattatatggatatcagtacatttaatccataccttgctaacatcgcaaccttgaatagtgcatggaaagatctatttgcgattgtatcacgatccaacgaatttctagctaaaatagaaaacctatcgtttgattatacagacaagatagatgtaaaatcagcttttaaaggtgaggcacgctttttaagagcattggcttattttgaattggtaagatatttcggacgtgtacccatgccacttgctcctcaaacaattcaagaagccatgtctaccaaacaatcggaaaccaaagacatctatgaacaggcaattattcctgacttgaaatatgctattgaatttatgggagaaaaggctactgattataaaggtgcagaagttgccagcgggcgtgcaactaaaattgctgcccaggcattattgggaagagtatatctgactatggccggattccctctttatgatgaagaaaaaaaggagaaagccaaagaacagtttgagaaagttcttgagtatgcagataaaacagggaaatattgggcaaaaaatgctgatgaatggaagaaaatttggattagcgataatgataataaatatcatatctttgaaatacagtatatagcggccaagggttatggcaatcctatggtatttcaatccgttcccaatgtaccatcagaatacatcggaattgcgatgtcaggaaatagcattacgtgttctacagatctcaatacaatattgaaatcagagaaagatgcaaataataactacttagatgtacgatgtttggcaacaattgatacaaccaagtatgtgaatgatgacaatccgaatagtataaccaaatatggtggagatgattttttcattaaattatttgagcataaaatgaaaagaaaagcattagggtatgaggacattgatgcccaaattgtagatcgtacttatttcccactcaactatccattaatccgtttggaagatgttatgttaatgtatgccgaaattgtaggccccactacaaaaggcatagaaatggtcgataaaatacgtgtacgtgctggtttgagcaaacttggtgatgcggataaaagtcctgaaagatttcaagaatgtgttgagctggagcgtcgaaaagaattagcattcgaaggtattcgttggcacgatcttgttagacataacaactactcacaggtcattcgtgataagtttatgagttatgccgtagataaaaatggaaatattgtacgtccggcaacagcagctctcataaatcgtgttgttcccggtacacatctgtatcccatacctaatccacaaatgaaggtgaaagaaggactgtatgagcagaatgaagcctataaataactcagcgaattcagcaattaaactcagattcgtacagtaaaatgacctgtttcaagcagtgaaactaataccctgtactgccagcgtttccgtccgtaactaccataataaatttaaaaaagcgggtttctttatataaggaacccgcttttaatttctttcaactatctatcttattcaacagctgcagataattcagcaccggctttaaatttagctactttcttagcgggaatagtaatagttgcttttgtagaagggttaatacctgttctttcagctctttcgcttacagagaaagtaccaaaaccaacgagagatactttctcaccggctttcatggcattagtaactgaagtgacgaaagcatcaagtgccttttttgcatcggctttgctcatttgagcttcggcagccattgcattaataagatcagacttattcataatacgtaaaatgattaattaatatatataacaaaagattctcccacaatggattaactccacaaatatagccgaacaaaacaacatatcaaataaaaacataaaaaaaacgcagcaaattattgaaaaagagctaataggaagcacttttcatgctttaaaacagaatttattcgtacttttgcatctattatcataatattcagaataaaaaatgatgccaactgtaactaaaaacctgataattatcaatgtactaatgtttttcggtacattcgtagcacaacgttatggagtagatctgactaattatctgggattacattttttcctcgcaagtgacttcaatccggcacagcttatcacttatatgttcatgcatggcggattcagccatattttctttaatatgttcgccgttttcatgttcggtccgattctcgaacaaacatggggacccagacgttttctgttctattatatcctttgtggtatcggtgcgggagttatccaagaaggagtacaatatattcaatatgtaacagaactcagccaatactcacaagtaaatataggtaccggtattatccccatggaagagtatctgaacatgatgactaccgtaggtgcttcaggagctgtctatgccatattgctggcattcggtatgctgtttcccgacaatcggttgtttatctttccgctaccttttccgatcaaagccaaatttttcgtaatcggatatgccgcaattgagttatggtcaggacttgccaacaatataggagacaatgtcgcccacttcgcccatttaggcggaatgctgttcggactgatactgattttgtattggagaaaaaaaagtaataacaatgggacatattatagctgatttgaaggaaacattcagaagaggaaacatttttatccaactgatttatatcaatgtcggtatctttgtgatcggcacattgattcatgtttttctacgactgtttgaagtcaacactctcgatatattcaacatattcgctttaccggcctctcttgtcgggtttatccatcaaccgtggtcgttgtttacctatatgtttatgcatgccggtattctgcacattctattcaatatgctttggctatactggttcgggagtttatttctttattttttctcggcaaagcatttaagagggctatatatattgggaggtatctgcggaggtttgctttatatggtcgcctacaacgtatttcctttattcagctcacaagtgaccggagcaacgttagtcggggcttccgcttccgtactggctatcgtagcggctacggcctatcgtgaacccaactatagggtgcaactttttcttttcggtgctgtccgtctcaaatatctcgcactggtcgttatcggaattgatgtactgtctattacctcaagtaatgccggaggacacattgcccatctaggaggcgctcttgccgggctctggtttgcagccagtctaagcaaagggactgacttaacttcctggattaactggattctggatggtttcatctctcttttccaaaagaaaacatgggaacgcaaacctaaaatgaaagtacactatggcagtaatgctaccgaacgacggaaagattatgattataatgcccataaaaaagcacaatctgacgaagtggaccgtattctggaaaaactgaaaaaatccggttacgacagtctgacgacagaagaaaagaaaagcttgttcgacgcaagcaaaagataaaaaaatggaacatattggcaaaattgtcgcatacctgatactggctatcaacgcattcttcgtgggaacgctgatattaagcgcttatagcccctatctcagccccaaagtcaatccgttagtttcctgtctcggactcgcatttccaatattcctgattatcaatctatttttcctgtttctttgggcatttgtcaattacagatatgcactactacccgtcatcggttttctgatttgctttccgcaaatacggacttatattcctttcaactctactacccggacaataccggaaggaagtatcaaagttctgtcttacaatgtaatgagctttagtaatctgaagaagaaagatgggaagaattcgattttatcttatctgaaaaacagtaatgcagacattatctgtctgcaagaatacaacacagccagcaataaaaagttcgtaacggagcaggatgtaaagaaagcgttgaaagcgtatccctatcaatccattcgccaacaaaggaaaggagatgtgcagcttgcctgtttctccagattcccgatactctcgtcacaacttattgagtataaaagtgattataacggctctatgaaatatgtgctgaatgtaaataatgacactattacattaatcaacaatcacttggaatccaacaaactcaccaaagaagacagagggatctatgaagatatgataaaagatccgaatgctaaaaaagtaaagaccgggctccgacaactaattcgaaaactaggggaagcatcggctatccgtgcctcccaagcagattccgtagcgagaatcattacagaaagccattatcctacaatgattgtatgtggagatttcaacgacggttctatttcgtatacccaccgggttctcactcaagaactggatgacgctttcacacagtccggtaaaggattgggaatctcctataaccagaacaagttctacttccgaatcgacaatatcctgattagtcctgacctgaaagcctataattgtactgtagaccgttctattaaggcttcggaccactatccgatttggtgttatatcagcaaacgataaaaacggagaattctatattataaaacacataatgatgattaaaaagacattaacccttttagcagtaagttgtatgatgtactcctgtgctacaaaaacagaaagtaatcctttctttgcagagttccaaaccgagtatggcgttccttcctttgacaaaatcaaattggaacattatgagcctgccttcctgaaaggtatcgaggaacaaaatcaaaacatcgaagctatcatcgaaagtccggaaatccctacattcgaaaataccatcgtggcattggataacagtgcaccaatcctggatcgggtaagcgctattttcttcaatatgacagatgctgaaacaaccgactcattaactgcactatccatcaagctagctccggttctttcggaacatgaagacaatatatccttgaatgagaaacttttcaagcgtgtaaacgatgtctaccaacaaaaagattccctgaatctgaccacagagcagaaacgcctgctggacaagacctacaaacagtttgtccgttcaggcgccaatcttagcgcagaaaaacaggcacgtttgcgtgaaataaacaaagaactgtccacacttggtatcacattcagcaataatgtactgaacgagaataatgcgtaccagctcttcgtcgagaaagaagaggatttagcaggattgcccgaatggttccgtcaaagtgcagctgaagaagcaaaagccgccggacaaccgggcaaatggttatttactctgcataacgccagccgtctgccattcctgcaatatgccgagaatcgtccgcttcgggaacaaatatacaaagcgtatatcaatcggggaaataataacaatgagaacgacaacaaagagaacatccgcaaaatcgtttctctccgtctggaaaaagcaaaattgttaggtttcgactgttacgcaaatttcgtgctggatgagacgatggctaaaaacgcgacgaacgtaatggaccttttgaacaatctttggagctatgcactgcctaaagccaaagaagaggccgccgagcttcaaaagctgatggacaaggaaggtaaaggcgaaaagttggaggcatgggactggtggtactataccgaaaagctacgaaaagagaaatataatctgtccgaagaggagacaaagccctattttaaattggaaaatgtacgtgaaggtgcttttgccgtagccaacaagttatatggtatcactttcaacaagcagaaaggaattccgacctatcatccggatgttgaggtgtttgaagtgaaagacactgacggttctcaactcggtattttctatgtggactatttcccgcgtgccggaaaaagcggaggtgcctggatgagtaattaccgtgagcaacaaggagcaacccgtccgttagtgtgcaacgtttgcagtttcaccaaaccggtaggcgatactccatcactattgacaatggatgaagtggaaaccttgttccacgaatttggacatgccctacacggcttactgacaaaatgtgaatacaagggaacatccggcacaaacgtagtacgtgactttgtagaactcccttctcaaatcaacgaacattgggctaccgaaccagaggtactgaaaatgtatgccaaacattatcagaccggagaagtaatccccgatgaaatcatcgaaaagatactgcaacagaagactttcaatcaaggattcatgactaccgaattgctggcagccgctatcctcgacatgaacctgcacacaataacagatgtaaataatatggatatactttcattcgagaaagaagcgatggacaaactcaatctgatccctgagatagcgccacgttaccgcgttacttacttcaatcatatcatcggtgggtacgctgccggatattatagttatctgtgggccaacgtattggataacgatgcttttgaagctttcaaagaacacggagtttttgataaaaccaccgcagatctgttccgccacaatgttttggaaaaaggagacagtgaagacccgatggtgctttataaaaatttccgaggaacagagcctagcttggaaccattattgaaaaacaggggaatgaaataattctgcaaaaaagcccttaaacatcaaatatttgagggcttgttacatataaatgtgaaaaaaaaactatatttgcagccttgtatgcggcaaaaagaacttgtatacgacagaatttaactgaatattaaattaaaaaagtaatcatcataaattaaaagtaaaatgcaaaacaaaggatttgtaaaggtttttgcggtattactcacgctggtatgcgtgttctacctctccttctccttcgtaacacgccactataccaacaaggcgaaagaaattgcgaacggcgacccgaaagtagaacaagactacctcgactctctctccaacgagaaagtctggctgggtaactggacgctgaaacaatgtcgtgagatggagattagtttaggtttggacctgaagggtggtatgaacgttatccttgaagtttctgtacctgatgttatcaaagcactggctgacaacaagccggacgaagctttcaacaatgcattggcagaagcagcaaagcaggcaatcaacagtcaggatgatatcattaccctgttcatcagagaataccacaaagctgctccggaagcgaaactttccgaactcttcgcaacacaacagttgaaagacaaggttaaccaaaaatcaacagacactgaagttgaaaaagtattgagagcagaagtaaaagcagccgttgagaactcatacaatgtacttcgtacccgtatcgaccgcttcggtgttgttcagccgaatatccaaagtctggaagacaaaatgggacgtatcatggtggagctgccgggtatcaaagaaccggaacgtgtgagaaaacttctccaaggttctgctaacctggaattctgggaaacttatacagccaaggaagttcttccttccatgcagtctgctgacgccaaattgcgtgctatcttagctgaagaaacaacaactgatggagatacaatagagactgccgttcttactgaagctactccggtggagacaaaagctgtaagtgctgccgatagccttgccgctgcactgaaaggtgacacaacagcctctgaaaagccttctgtaaacatggaagagctcaagaaacaatatcctctgttgtctatgcttcaattgaattcaagcggacaaggtcctgttatcggttatgcaaactataaagatactgctgatatcaacaagtatctggctatgccggaaatcaaggcagaacttccgaaagaccttcgcctgaaatggggcgtttctccttctgagttcgacaaaaaaggacaaacattcgaattatacgcgatcaagtctaccgaacgtaacggtaaagctccgttggaaggcgatgtagtaacagacgctaaagacgaatttgaccaatacagcaaaccggctgtaagtatgacaatgaactctgacggtgcacgccgttgggctcagctgacaaaacagaatatcggtcgttctattgctattgttcttgataattatgtatattctgcaccaaacgtaaattcagaaattacaggcggacgttcacagattacaggtcattttactcctgaacaagcaaaagacttagcaaacgtattgaaatcaggtaagatgccggctccggctcacatcgtacaggaagatatcgttggtccgtcgttgggtcaggaatctatcaatgccggtattttctcattcgttgtagctttgatcctgttgatgatctatatgtgctctatgtatggtttcatcccgggtatggttgccaacggtgctttgttcctgaacttcttcttcacattaggtatcctttcttctttccaggctgcattgacgatgtccggtattgccggtatggtattgtcgctgggtatggcagtggatgcaaacgtattgatttatgaacgtactaaagaagaacttcgtgcaggcaagggagtgaagaaagcattggctgacggttattctaatgccttctccgctatctttgactctaacttgacatctattattacaggtatcattctgttcaatttcggtacaggacctatccgtggttttgcaacgactttgattatcggtatcctcgtatcgttctttaccgcagtgttcatgactcgtctggtttacgaacatttcttgagtaaagataaatggcagaacctgacatttaccactaagatttcaaagaacctgatggccaatacacacttcgattttatgggaacaaacaaaaaatcccttattatcgtcagtgcagttatcatcgtttgtatcggttcgttcgctatccgcgggctaagtcaaagtatcgacttcaccggtggacgtaacttcaaggtacagtttgaaaacccggtagaaccggaacaggtgcgcgagctgatctcaagcaagttcggtgatgcgaacgttagcgttatcgccatcggaacagataagaaaacggttcgcatcagtaccaactaccgtatcgaagacggaggcaataatgttgactcggaaatcgaatcatatttatatgaaacactgaaaccgttgttgactcagaacattgatctggcaactttcatcgaccgtgataaccacacaggcggcagcattgtaagctcacagaaagtagggccgagtatcgcagacgatatcaagaccggtgctatctggtcagtcgttctggcattgattgccatcggtttgtatatcttgattcgtttccgtaacattgcatacagtattggttctattgcagcattgacttgtgacacaatcatgattatcggtgcttattcattattctggggtatcctgccattctcactggaaatcgaccagacctttatcggtgctatcctgacggctatcggttactctattaatgataaggtggtaatcttcgaccgtgtacgtgagttcttcggattgtatccgaaacgtgacaagcgtcagttattcaatgactctctgaacactacactggctcgtaccatcaatacttcattgagtacattgatcgtattgttgtgtatcttcatcctcggtggtgactctatccgcagctttgcattcgcgatgattctcggtgttgtaatcggtactttatcttcactgtttattgcatctccgattgcatacaactttatgaagaacaaaaagactgtagcaacaactacgggagaataaaatattccagaaatagaaaaagcctcttccgaagttcggaggaggctttttctattgattattaaaacaaatagaagctataagacgttcatcttaaaagaagccattgtaaaacttaaaactcgatacagcatgaaagcatccaacacaacttcctatagattctttgtagtagccccgaggggaatcgaacccctatctaaagtttaggaaacttctattctatccgttgaactacaaggccgttcctattttgattgcaaagataacggtttctgttgatttaacaagaataaaaatacaggttccttccagatatttcaaatattttgcgtcaataggacaataaagtacgttttattttgataattcgattaactttccgacctttgcgctcacaaattgaaagtaaaagcagtttttaaattaaatatagtaattaaagttatggcagacgaaatgatggttaaagaattggaggaagtagtagtacgtttctccggcgactccggtgacggtatgcagttggccggcaacatcttctcgaccgtgtcggctacgattggcaatgacatcagtacattccccgactatccggcagacatccgcgcaccgcaaggttcgctaaccggtgtttccggttttcaggtacacatcggtgcagaaaaagtttatactccgggagacaaatgcgacgtattggtagctatgaatgccgccgcattgaaaacacaatataaattcgcaaaatccaccgcctgtatcatcatcgacacagacgcctttcaaaaatcagatttagataaagcggcattcaccaccgataatcctattgaagaaatgggtatcaagcaagacgtgattgcagcacctatctcgcagatggtaaaagactgtttggcagatacgggaatggataataagtccatgctgaaatgccgtaatatgtttgccgtaggactggtatgctggttgttcaaccgcgaccttaacatagcggaagactttatccgcgagaaattctccaagaaaccggaaatagcggaagcaaatatcaaagttgttcgtgccggatatgattacggacacaacacacacgcttccgtagcacatacatataagattgaaagtaaagcagccgttcccggaaaatatatggatatcaccggaaataaagcgactgcatacggattcatcgcagctgcagagaaagccggactgaaactctatttagggtcttaccctatcactcctgcaacagatgtactgcatgaactctcaaaacataaatcattgggcgtaaccaccgtgcaatgtgaagatgagattgccggttgtgcttctgctatcggtgcttcatacgccggtgcattagctgttacttccacttcaggacctggtatctgtttgaaatcagaagccatgaacttggccgttatcatggaattgccattggtcgtattggatgtacaacgtggcggtcccgctaccggtctaccgaccaaatcggaacaaacagacctgttgcaagttctcttcggtcgtaacggtgaaagccctatgcctgtcattgctgcaacatcccctacagactgttttgactcagcctatatggctgctaagatcgctttggaacacatgactccggtcgtgttgttgacagacgcatttgttgccaatggttctggtgcatggaaattgcctaaattggctgattatcctgctatcaatcctccttacgtacgcccggaaatgtctgaaacctggacaccgtatcaacgggacccgcagacaggcgttcgttattgggcagttccgggtacagaaggattcactcatgtattaggaggtcttgaaaaagacaacaagacaggagctatctcaactgatccggaaaaccatgacttgatgacgcgattacgccagcagaaaatttccaatatcgaagtacctgacgtagaagttgaaggcgacaaggaagatgccgaattgctgattgtaggtttcggaggtacttatggacatttacacgccgctatggacgaactccgtgctaatggtaaaaaagtagcattagcacactttaagttcatcaatcctcttccaaagaatacggcagccttgatgaagaaatacaaaaaagtggtggtagccgagcaaaatatgggacagtttgccggatatctccgtatgaaggtggacggtttcgttccttatcagttcaaccaagtgaaaggacagccctttgttgtcaatgaactagtcaatgcattcactgagattatcaacaagtaaaatcaagaaattatgagcgaatatacagctaaagactttaaaaaaggacagccacgctggtgtccgggatgtggtgaccactttttcctggcttcgttacacaaggctatggcagaaatcggtgtcgctccatgggatacggcagtaatttccggtatcggttgttccagccgccttcctcactatatgaatacatacggcatgaatacaattcacggtcgtgctgccgctatcgcgacagggtgcaaagtcgccaatcccaaactaaccgtatggcaggtaagcggtgacggtgacggtcttgctatcggaggtaaccatttcattcatgccaaccgacgcaatatcgacatcaacatgatcttgctcaacaaccgtatctatggtctgactaaaggacaatactcacccacttcaccgcgtggttttgtcagcaagtcttctccctacggcaccgtagaagacccgttcaatccggctgaactatgttttggcgcacgcggacattttttcgcacgtgctgttgccacagacgctcccggtacaatagatatattgaaagctgcctataatcataagggcactgctgtctgcgagattttacagaactgcgtcatcttcaatgatggtacacacaactccgtatataacaaagaagggcgtgcaaaaaatgcaatttatttggaacatggcaaaccgatgttattcggtgaaaacaaggagttcggattaatgcaggaaggttttggactgaaagttgtgaaactaggcgagaacggtatcacagaaagagatattctgatacatgatgcacactgcctggacaacacactccagttaaaactcgccttgatggaaggtcctgacttccccatcgcacttggtgtcatccgcgatgtagacgctccaacttataatgatgcagtagaagcacaaatcgaagaagtaaaaagcaaaaagaaataccataatttcgaggagcttttgatgactaatgacatttgggaagtaaaataatcacactatccgtagaaagataaaggcgtagattgagaagtaattctctttctacgcctttgtcattttccaagataacccatctttttggggagatgaggttctattactgtcctcttttgtttttcttatcaaataagcctgttttaagacagatcaaatgtgactttacgaggaaattagaacgagtatgaaccggaaagttcaaccgtagctttcaaaggtaattgattagaagccgggcctacaagaatctcaaactcgcctttttccactacaaagcggtgctgattcatatcgtaataagcgaatgcatcctcattcagcacaacagaaatccgcttcttctcccctttctgcaagaaaaccttttcatatcctttcaattctttcaagggacgggggacagaggactgtacatcatatacatacacttgtgccacttccgaggcatccatcttccctgtattctcgagatcaaagctaacggtaacctgatgctcacccgttttctccgcagctatattactataagcgaaagtagtataggacaaaccgtagccaaacggatagaaaggttcttttcccgaacggtcgtatccacgataaccgacaaaaacaccttcagaataatctacacgtttaatctctgcctttaagttctcgtaataactaccatgcaccggattatcttcccatttcttttcgatagaaatcggtagctttccgcttggagaaatcttgccggtcaggatttcagctatcgcttgtccgccttcctgtccaggataccaagccataagaatagcttttgcggcatcataccaacctgtgaaatccacaccgccaccggcgttcagcacaaccacgacattagggtgcatagaggcaatctttttgataaacaattcctgataccgaagcaaagcaaacggacggtcaaagccttcgccttcggtattactattgaaacctgtgcagaacacaacattatccacctttgccaatccttgacgaagtttcatctcattaaggctataagcattaaaacgaatgatgcccgaagaaatattatcaaagaattcaatccggaaacggtattccttaccaccctcaaccggcagttcaacttcacggctagagtatgaatgatttccccaatctcccgtaatatgcttgtcattcacaaacagacgataaccgtcatcaccaccgatatgaagtttcaactgaccatcagtttgtggcatgtagcaggctgtccaacggacagagaagccatctgtcggaaagccgtccaaaggtgctccatatccccagtcataatcaacagaggattccgtgcgtattacttccggctgtcccgaaagcgtcttgttcttaaagtattcagccttgaagcctttcacctgacgattgacgtcagtataaaactcattgataatatcttcataaatcacatcatccgtcaataataccagattctttttcttcagttctttcaagccttgagccactgaaatggtagaaaaaggagtgacaaaaccactgccgccaccggtaggtatcaaatctgcattaggacccattacggctgtttttcctttcaacgggagcaagtttgcttcattcttcaacaatactactccctcgcgtgccagttctaaagctgtctggcgagagaatggattatccaacggaatattactgtctttctgttccttatccaacattccataagctattaaagtctgcaggatatgttgtactttcaggttaatggtttcttcggtcaccgtgcctgttttaatagcggggataagattgtcggcattcatgaaacgccctttgggcatttcgaggtcaagtccggcgttagctgctccgatagcggaatataccgaagtccagtccgacatcagaatacctttgaagccccaaagattgcgcaagacatcaatattcagccatttgtgttcagtggcatggacaccgttcaggagattgtagctgttcatcacagcactcacgttcgcttcctgtacagccttgcggaaagccgggaaataaatctcatgcaaagtacgctcgtctatgtccgaactcgcatgatggcggctccactcctggttgttggcggcaaagtgcttgatggtcgcaatgactccttccgattgcacgccaagaatatattgcttggctgtctcacccgtcaagtaagggtcttcaccgaaatattcaaagttacggccgcacaacggagcgcgatagatattcacgcccggcccaagcaggatattaacgcctcttgccttggcgtcctgccccaagccttgccctaacttataaagcaagtcacggttccaggtagaagcggaaaggataccggacggataaagggtgcttttaggagcatggttacggattccctgcgggccgtcggcaagacgtatttcaggaattcccaaacggggaatggcacgcagggaaaagctggtatatccggagatatactctattttctcttgcaaagtcattttggatacaatctccttcgcgcgttgttctacttgaggagtaattgtctgtgcatgggtcaagatgctgcatgcgagcatacataaaccgataatgcctgttttctttttcatggtgatcatgtgttttagtctatcaattctattttaacggtctgtcccagtacgtgaatattgtattctccggtttcgaggaatcgtttaccgtcctcattgacaaatccgaaatcacgttccaggtctatgtcgaaacggaaagttttcgtttctccggctttgataagctgcttttcaaagtgtttcagttcttttacaggacgggtaatcgagcaatacgggtcggaaataaaccagtggacagtttctgctccgtcacgggcaccgatattggtgacagtcacttccgccgagagcttctcgccacgcttcactttagtggcagaaggggtaacagtgccatacttgaattctgtgtagctcagtccgtgaccgaaaggatataacgggtcacttgtgatatctttataaaatccctgatgtccacgtccgctcttacggcggttataataaataggaatctgccccgtcgaataagggaaggtcatggcaagtttaccggaaggattaatacgtccagacaatatccccgccatcggcagtgcgccattcacacccggctgccagatttccagtatggcatcagaaaccggttccagacggttcaattccaacggacgaccgttgaccaataccagtacgacaggcttgccggctttcttcagttcttttgccagttcttcctgcatctgtggtagtgcgatagaagaacgggaagcattctctccgctccaagtcatcatctcgcccaagcaaagaacaacaacatcagaccagcgtgcagcttccaatgcttctgcaaatccttcgcggttatctccttgtgtattgcagcctaatgcgtaacgcagttcggcttttcctgcaaattcagcagccagaccatcataaagcattgccacatcggtatcctttccgtgaccacgccaggagcctaacaagtcccaaccattttttgccataggacctatcacggcaatcttctttttatctgtcagtggtaaaacgttgttttcgtttttcagcaataccatggattctgccgcaagccgggcggcaatatccatgcttttcggacggaagaaacgttctttctctgttgtagcgggagtataaggacgttcgaacaagccgagacggaatttcagaagtaagacacggcggacagcttcatccacttgagccattgatacctcgccttcttctaccaactcctgcaaatgacggtcataagcatgagacatcatatccatttcaagaccagcggtaaacgcataccgggctgcttcctttttggttgctgccaatccctgattttttaactgttcgatagctccccagtcggaaacgataaaaccgtcatgtctccaacggttctttaatatctcggtcatagtataagggtttgccgaacccggtacaccgctgatatcattaaaagaactcatcagagttgccgcaccggctttcacccccatttcataagggagcagataagtatcccaaagagtttgtttggagatttcggtataaacataatcacgtccggcttcggatgccccgtagcctacataatgtttcagacaagctgccacacggttttctgccgacatattatcaccttgataccctctgacagaagctgcgccgaacactccgttcgcataagggtcttcgccatagccttccgccacacgtccccaacgagggtcacgtgctacgtcaatcatcggcgagaacgtccagtccactcccgacatacgggcttcctgcgcagatacggcacacgcctgttccaccaaatccgggttccaggaacaagcttgcgccaacgaaataggatacacggtacggaatccatgaatcgcgtcataaccgaaaataataggaatacccaggcgggattcctccatcgctttcttctgcatattattacgcagttcgggatttgtctcgaagtaaatcagagaaccgatttccgccggcactttctttacctcttcgcctacattattcacgttgttgttccgtcccaaggtatattggttcaactgcatcactttctcttccagagtcatgcgggataacaagtcgtctacgcgtttctcaatcggagcctttgcgtctttatataatgcacccccttttttatcctttgctgaaagggtacataccgtacccagcaaacagattccgtaaactaatgctttttttctcatttgtattttcgtcggttagttagtaataaacaagtcagtcactttatacggatgctttactgctgcatgggcagctttctgggcaacagctttccgcgcctcatccaacccttccggagcataaggattcccgactacattgtgtttgaagattcgttcgaaccaggtacaggcagcggtataacgtccaatcttcacatccagatgatagccgtcccgattcaggtggtcgccgatgaaagaggtgcgcgcattttgtatggcagtgcccgaagggatgacaatctttatcttattcgccttagccgctttcttcactgcatcggcaatagcctgatacatggtcagttgattgcagttgtagtttttaaatccactatgcttggaagtagacgcatacgcccaggtttggtgcagcatcagctttgttttctttggaaggcgtgcttttacatattctatgagctcaggaagagaggcttcatacgtctcatacattcccgaaaaaggacttgcctgttgcaggctgacgtaatcccagtcttcatctgccagcaccgcttccaaagacatcttgcccttttcccgtttctttccatccgtaccgattttccggtaggcataggcaggagcattgtcacgggcatttttcacatgacgttccagagaacagccgccaataaacatattgccgattatggttgaaatgccttcggcttcggcaagttcatgcagatattgctccacggcatcttgggagaagctgttgccgatggcaagtatcctgaccgttttttgctgcgcatacgctcctccggcaagaaggagcagtatgcacatacaaatcactacaatcttatattgcttcatcacattcaaatatagctaaacttatcggttatttctctttttcatgtaataatctctcatcagataccacgctttcttacgcataccttggtcggatatgagtcctttgcggttccagccatcttgattggtggggtggaaacggaacggcgaacggaagtcgaacagaatccagggagatacaccacgcaggttcgggatattgtcgaacatacggatattatccctatacagacgtgcctgatattcctcactccaggagctgaccacattctcatcaccggactgaccgtacaatgcttcgccgccaaattccgagataatcaacggtttgtccgtcacgacttcccatatagcgtctttcggttccacaggccacggatgataccagcccatatatttattgatagctacgacgtccagttgggaagtgaaagaatcttccattacaaaacgctgtttttcgctattgaagtgcacaaggtcgaaagcggcaacatacaggcgggtagtgtccagctgctttcccgtttcgagcaaggaagtaaggaattcattccgttctttggaaggctgtgtttcattggcaacaccccaataacctaccgcgcagcggttttgatcgcgcttaatcatttcagaaagcatcctctgcgctttcttacgggtatcatcgtctgtaaagtcaatgccttgccaaatgggaatctcctgccagagaaggaagcccatcttttccgccaggcgtaccgtgtactcattctgcggataatgagccaggcgaatcatgttcacgccaagcgctttcgcttcattcagcaacatggctgcatcggcttccgagaaagcacgccccatacgttgcgggatttcttcgtggaaagagatacagcacataaatgtcggcttcccgttcaggtaaatgtcagttcctttcacggtgatattgcggaagccgatttgctcttccacacggtcgatacttgaagagacggtcacgccatagagtttcggttcttcaggcgaccagcgttgcagcttcttcgcattcaacacggtttccgcctttccttctgcgtcggtggtgagctccgcgttgattttgagttcggggatggcaactgttactttctcacctgcttttttatcagaaagacgcacgcgggcaattatccggtcggaagcatttttatccaattggacgaaataatcttctataaatgtccggggagttttcaccaacagcacatctcttgtgatgccgccatagttccaccaatcgaatgccagagcgggaatggcgtctttggtgcggcggttgtttacttctaccgccaggaagttgtcaccgtctttcaacaggtctgtcacttccacttggaaaggagtaaaaccgccttcgtgctccgctatttcttttccattcaggtagactttacaacgatagctgacagcgccgaaataaagaaactggcgtttgtctgccaagcgtttggcgtcaaagtgacgggcataccatacagttccttcgtaatatttcagttcgggcgactgggagttccaatctcccggaacgttaagacgcaacccgccttcgaatgcgtattcgtagaaatcaatatttccttccggttgccggttctcatagattttcatccgttgtccctggtcgtacaggtcgatgatggcattccatttaccattcagcgaatggatgtcacggccatatacattcgttatcagctcttgtgccgcaacgcttccagcaaaagcaatcagcaacaataaacataggtttaatttcatacctgttttcatttatctattagtttatggtattagtatattattcgtttttcgatttatttttcaagaaattcattacccagttccaggctgcgctccactgttcggcataggcataatgggcggtcgtctcagctacaaacagttctttcggagcattaatcacgttgtaagcggagtaagtagtagtaggcggacaaaccatatcattataaccaaaagtatagaatcccggcactttaacctgacgggcaaagttgactacatcaaaatactgaatggttttcatctttcccggtgtccggttcttctcatccttcaacatatgcggccaaccgcctgcacgaccgtgggcataacccgccatatcacacaaggctggatagaaagaaaccaatcctttgacacgagcgtccagtccggcaattacaatggaaagcgcaccgccctggcttcctccaaaggtcgccagattgccattgaactcgggaagtgtgtaaatgaaatcaatggctctcacgcagcctgtataaacccgcttgtaatagtatttgtcccgattgtccatattgaacgagtggtagttcttcaaagctccgttataaaggcggtgatagacatccccctctatattgaccgggatgccgtgaataccgatttccagaatgataaaaccttttccggcacgttcggcttctccgttataggcacggatacctgcccccggcactttcagaatcgccggatatttcccggaagccttcggaacacaaaggatgccgtacatacgggacgcatagtcattgttcgcgaaggaaacatgatatacgttcaccttatctgtgcacctttccggcagtaaagtcattatcggttccagtgcccacttttcagcggcttctttggtgcttttccaaaactccagaaagtcggcgggcaaaggagtggtcggttgcaatttctcaggagagaagccgacggtagccacgccttcatactcacgcccttggcaagtgacaaaagcatggcaacgcaggaacccttcttttttcatagtccctgcgttaatttcaagcttttcgttcttcaaaggctgtttgcctgtctgatgaggtttcatcatgtcttccgaaatctcatagcgcacttccagattatcctgtgggatattgcatttcaataccgtcactttgaatttcactttttctcccggtttatacagccaattggtgtggtcgggagtgacctgcacttgaatcagtctttctgccggttgcccgtatgcaacaaattgcaggacgacaaacaaagcaagaaaaacaaaacgcaaactttttatcataattccgttattgttaatagtcttttcatggtttcacttcgtattgataaagcgcgaaagagttcttatcattcagttcgaaactgactttaccctgtgcgccgacttttgcggcaaacttcttaccacttcccattacaggggtaaaagtaactttcttaccctctggaagccaagtgtcaatagtccctctggcttgctcgttgtcttcgcgataaaccacaagatagccttgcgtaccggagacggtcgattggaatccggtccacgagcgtcccgaaggttcttcaccaataggcagtatgacgccttgatgaaaccggagttgcaaaggttggtatttcttgagcagagatgccgtaatataagcctcttcgggcaagttcgaagcctccatccaagccaacggctgtgccgccaaggtgatagcaaagaggtaatcgaaactgtaacgggtgggggcaaaaggatcggcagcgtcatacttgtcggcattgcgccatttattaaggaactctatctgcatcttctccgccggtacatagcgagacagcatccagaggttgcgcaaggtgcgataagggtaatagttgccccaatcggtatagcggttttccagaaagatgttgccgtactcgttcatatagtgatacccgccgcgacgaccggcagtggcatcgaggttgaaaatcacttcatagttggtttgctccaacacggtatcaaacagtcggcgcagattctgttcggctgtcttggtaggtatctgcaggccgtctatcttgaaacagcagatgccgtacttcttataaagtccgataatggcttgcgcatctttttgccaatcggcaaaatcattctgtatgctgggattgaaccataatccgatgcgaatacccaatttcttgcctttctctacaataagtttcagcccatgagggaactttgtggggttgggcgtccagtaatcgccacttttccagatatccttaaaactacctccggcagtcttcgagttagggctttttccgctctgccagccatcgtccagctgaaagagggtgatgcccatgcgtgcggcacgatccagttctgccagacagaaagcctcatctattttggcatcctggctacggtcgccccaggtattgagcataatcatctcatcctgtgcggcggtatgatggcgcagttgtttctgatagaggcgcaaggcagtaagcgcttcttgctcgccgccggtatagatgccggtaacgcatccataaacgcgggtccagctatccggctttacatcatgagacgcaatgcccagccccactaccataaaatcgctaaagtccgccacgaagtcagaacccggataatgtaattgggtactgctgctaggagcctctttcaaaaaaaagaagccttgacgcgtaactacgtcatgagcaaaaagcaaattaccacgatacgtattgcgacggtaaggaagccaggtacgcccggtcaccagattgtcgttccaatcggtgtagtcgaaaaactctattgtgcgggcactccaatgattgccggatagttgcagcctgtcgagcgtgggagttttcacccccgtagccatatcggccgtgtgctctatatttttgcggtcagcgttagagcagttatcctccttattctgataaagttccacttgccctttcagataggtgtcgcaagcaatggcgggacagtctgcataaatgcgatagcgacgctctatattcagcgaaccgatagtgcaagccacggtagcctgcagataactggcgtggatgccgttcgtcggtatctcgttcacggtaagcgtggcatccgtagggatacctttcacaatcgagaaatcgggttgtttgccctgtgccggaatggtttttccgtgttgcttgtcagtaaggctgatggtaacaggcgcaccgttattccacagcatgacgcgttccatatagttattgcccatacgtagcgtgtcacctttcagaaaagcgtaatactgttgtcccccccaaagcggcaaggtacatattgccgatagaaatatcgtgataatattttttttgctcatagtttgtctacggtttgatgtaagctcccggaacttccaacaatttgttgggttcgttgaagcgttggttatcgggcacatcgcgtttgcccagacccgcttgcataagttgcttcagttccggcaggtgatgatgatagatgtcgcgcggctctacactatgcttgtggcagagtccggctgccatacctactacttcacccatcatgccggtagtacgcatcacacgtaccgtacccaaagctacatgggtgcagctcatattgcgacctgccataaaaaggttgtccacattgcgagaatagaggcagcgatagggaacggcataaggataaatccaacgatgcaccgtagccgacttgaattcattgccgggaaagcggacactgttcacactgtcagggaagtgaaggtcgatgctccaggtcgtggtaaacgaagcatcctcatgcgccacattcttgtctatatcgtcctgtgacagtacgtagtcgcccaagagacggcgtgattcacgtttgcctgaaacatacgccacccagttgagggaacggttggcatacttcttatggtctttatagtgattcttcagatagctccagttggaatatatcaccaaaagtccatagtcgcgtacacgttcagcttcgctgacttgattgcggttcatacccgtttcccatttccactcgcccatagttacaggctcacagttttcagcgtcaaagcgcacgccatattcaaaatgagggaatgaggttttcttcttcatgtccttactataccattgtatagaagctcccatcaccaatgagtcgggttgctcgggagcaaggctctcgccatattcatcgcggccttcacgtcccatagcccaatcggcaccggctaaatagcctatggtagcatcacctgtgcagtcgctaaagagaggagcagtaagttcagtttgttcgcccgtctcgatatgctggatagtgactgacgcaatgcggtctgcttgcatcttcacggctaccgcacgctgagaggcataaagggtaatgttcttttcggcctctataaagtcttccttcttctgatcttcatagtagtcgcccggttgggcattgccggaacgctcatggccaaactcacgtatcatacgacccaatccctgattaggccccatttcgatgataccgccgagatgtacacgaatctctgacgagttattgccgcccaatacaggacggtcgttcactaatgccaccttacagcctaaccgggcagcagatgcggcagcacacattccggctatcccccctcctactaccacaaagtcgtattgatgagcggacaccgtctgttgttgtcgcaagcgggcacgaagtgcggctgtctctgccgtatcccaggtagcgggctgcgtgttcgcatcggtcgtaaggtaaatggcatcgcaacgaccatcgaaaccggtgaggtctttcagggcaagggtagtagtccctgctttcaatactgtctttccggcaaattgccattgccaagaattaccagtatgtcctaatgtagctttcagcaatttaccgcctaaagccaggcggaactttccggggccctcggcatcggtccaaggtgaagtccagttgtaagtacgggcatatacgtagtaagtgcccgcctggggaatgttgatttctgccgtagcatccgccacagggatgcccatgccatgtgccatgagatagggcgaacccatttgatccatgaactgctggtcgagcacccagccgcctcgctggctgaagctttctgcttcgatgagcagttcttcggctacagccacaaggctacaggctacggctatgcatgtcagtaagatttttttcatcacagcacagcgtttttatgattattgaatagttatatctcctacttttacccaaccttcggcggtttgatactcatcgcgggccgagagtaagataccgatagcgttctctttggtcgtatctaccaatcccactgcccaagtgtaagtacctgcggctacatcggtgagtttgatgttactagtataagttttgggctttccgctcatccaggtagcaatgtccgctttctcttctatatagatgcgggcaggcttttctgtatttttatcaagcaaagcgatggccaatttgtatttgtcaccgtactgcggcagattggtagggcaatacccccaacccagattcgaccaacggtgagtaagtgacacgttgctaccactacgggctgtagtaggaatagataaacggtcgggatagagacggtaaccaccttcggctataaactcctttaccaagtggaaagcagtgttaaaccaagagtgtgtttcaccagtattcacgttggtagcaaaacgaaagtccatcatattgacataacttcccttagcctcatcatattctccctgacgcacttcggcaaaattcttataaccgtcgccggcaatagaaccaccgtgggatgattccacccaaccaccttccatagtgataggtacaatgccacgataagcggcagcgatgccacgctcccaatccttataatattgcttcataccaaaagcatcgtgacgcaggcagaaacctttggctacagcacgtttcaccaaatcggcagatataccggtatcaacatcaccagatcctttggtagaaagcaggcatcggtgatagtttatcatgataggcactttggtgaaaagacgagacattacatcggtaatccattcgaatacagcttgtctagggctctcatcacctgtagagtatttcagtgtgtgagtttccccccatttgcccaagccaaagccgcttacaaactgagtgatatcagggtcattgtatttggcagcgaaagcagtgaggaaggcttcatactctttctgaaagatggggtcgtcaggataaggtgtccatacgtctacactaccggtagtagtggtgaatccttcggcaccggcttctctcacatactcgggacaggcattttcatgcttgtcgcgactgtcacacacaaaggtgaaagcgagtttcaagttgcgttctttagctccttctaccaacatacggaaacgtttcgccggttcagtctgcaaagtctcatcccacacatatttccccctttcaggattaaaatgactccaaagaccacgtatatagagagtattgccatagttggatactttcacggtgccttcggacgactcgaaattgtcgtagagatcccagaaattcatcatcatgccacttccgataccagcgtagatcacccatccactcatgggattacgcagcagtttgtaacgttcaggcttaatgctgacagtagtgttaccttcgatgttccaactgtagtcggttgtaaggtcatcatcgtctgaacaagcagtgcctataaaagccgtagcagccaacaggcacatcgacaaggtcttgatgctgttttttattattttgttcatagaatatatgtcgttaattgttattgtttaaaaggcagaataagaagtgaagtgattgaagcttcaccccttattctttcattttggatttatttaatatcaaagagtacagtgttattctctatatccactactacatagttacagccttcggggatgaggaagtaagcatagcggttatgactctgcccaactactgcaccctctatcttaccggcctctacttctttataaccgttatgtttatcccgttcagcatcagctgtagaaccaacaaaccatccgttattggcatatcgcagcgtacagaagtttacccaaccagcattagtcttaccatagttatcagtagattttgtgcgaggcaatacatcacctttataaacaaagactttcggattggcaagactctgaataaggtcatacttcacttgacagtacataagaggctttccggtttcttcgtcagtacctgcatcgtaagcaaaaccattgaaaccaccatacatatgcaatacattcacctcttgcctccatgggtttatccccagtattgtattattaaacgatacggtaagcggtttcaagtcagttgcagccgaatagatagcaatggtcttttcctccttattcaatacaatacgataagtcccgtcagccggaatagtccaatactgcctgtctactttgctgataagtgcttgcccgaacgttgccaactgaccatcttcgatgtcatggttatctgctacttccggcacaatagccatcgattgttcgccctcgaaagtaagcggtatgtaaaggctaccggctttcaattcaccgcgccaagcataaagttgatcattttcgagagtttgggctatctcaatttgttcttcacctacagcagtacccgccaagaacatttgctcagcctcaactaccgcaccggcttctactatcttcacagtctgcttgctcatattcacagtgatacgataagtagccgctgacggaatcacccacgaattggcttcggcgcggtcggatataacacctgtcatttcacctttagttataggagcatcggcagtttccgggccaatggcattcaactcatcggcataatcaacagggaagtttatcttaccggctaccaaagcgccttcgtaactataaatcttgtttatctcgtctttcaacgtcaacttgatattatcttcgcctacagcggaacctcccacatagagattatcggctttgtactgctttggaccatacgtttttatctttaacgtagtcgtagcaatatcaggcactatcagacggggaccctcaaagttggctgttacagtaaacagtacttcgccaatggtactggtggtaagtccgaaatggtcgaccagtattttctgcatctcctcgttggtgtacgagcgaaagaattctccatcgtcgtcaaactccttgatattcgtagcctcactaccgatgagctgcatctcgtatttgtaagtcgtgatataatcctcaccaaaatcgtgagcggtactccacttcagagtgacagctgtttcgttgggtttgctctcatcgagcttaataaattcacccgaaggagccagttcaatctccgactgattgcgtgagacagtattgtctatatcctcttcacacgaggtagcaagcatgctcatcattcccacagccaccacaccaagatttctatataaatgcattgttttcatattcgtaataatttataggattaataacccggattattaggtaacaagttgggacacaactccacatcatgtgtaggtagtggccacaaatattcacgttcggggaagatacgtttagcaccctgcgaacaataaccggcattgaagagagccgaaaaatcagccagaccatcttcgtcaatttgcggagtctttccccaaaaccaaagattcttattcacaatattattcaataactccgtcggatcgataagcataatatagttgtaaccgttcagtgctttttctgccaacttccaacgcatcaaatcctgcaaacgttgattttccatagcaaactccatgcgacgttctatacgcaaagcgcgtcgtagttcagtctggtcggtagtagtcacggctggatagctatcagtcgctgttacattcactccataagcacgagcacgtaccatattaatagctttcaacacactgtcatcaatccggttcagttctatcatagcctcagcataaatcaacagtacatcagcataacgcattataatgtagtcttgctctaccttttggtctactgtccaactagcatcaatgcctttcttccacagcaaacccgtatatgagctatattgattcacgatacgagtatcttgattgctttgtttcttacctgtagtataattcatcacggttttagctgcaggactagggtcatattcaaaaccacaatgttcagtgttgaactcaacaatagtcattatacaacgtgggtctcgattcttaaatgggttgtgcggatcaaacaatggagattcgtcaataggaagtccgtcagtacagaggtatgcagcgaaaagatcccatgaaggattatacgatccatatcccccagcattacgaggaagagcgtttttcacaatccaagagtcaagtatcacactgttttcaatagagcgtggtattacaaataccttttcatcatttaatttggtactctgcctgaaaagtttggcatagtcgggctccaatgaataaagttcaagatccatacagtctttagcagctttagcagctatttcataatcccccatataaagggcaaaacgtgctttcatagctagtgccgcacctttagtggcatgaatattttcgtcctgtccatagctttcgggcagtctagcaacagctttatcgaaatcagcatataccaaaggaattacttccgctttaggtctacgaccacgctgcaaagcttcagaaatagtgatagtctcttcctgataaggcacatcaccatagaaaaaaatcaaatccgcgtatttacaagcacggcaaaaatacgcttcaccagcatagcggtcgtaaacttcctgtgttacattatccttcgccttatgaatattttcaagcattgtgttggcacgagcaatcaatttaaatgattgttgccacaaagcatatacttcatactgctggccattcatagttccatcaagtatagttccaccacttcccggattacgattcgtttgacgataggtagtgttatctgaccattgttcggacgaattaagaggttcttgccaataacccaaaatgtaaaattcattagatgccaagcgcaattctgtttcggttgtataccatgactcggtattaccttgcgatttaggaaccagatccatgctctcacaggctgcgagccccaaacacattccagctaataataatattcttgttttcatattctactcctaatttatttaaaagttaacttgcaaacccattactaaagaagttgtaatcggataagatgaagcacccatttcagggtcccacccatcagggaaattactcaaacagaaaagatcactaccacttatataaaagcgaacacggtctatacccgctttttgtgtccatgtttcaggaagagtataacccaatgtgagattcttcaaacggaaatatgagccgttaaacatccaaaagctagacgtagcatagttattacttttcgatacattcgaaagacggggatacctagctgacaaattctcttctgctgtattaaaaggactccaatatttaccttcgataatagacggaacgctcccataattatcacgtagtggctgcaccatggcagtagaaagatatgaattttgcttgccgatgccttgaaaagcaatactgaagtcaatacctttgtaagaagcattgaatgtgccaccatattggaaacggggcaacgaattacctaaaggtacacggtcatactcaggactgattataccatcaggtacgccatccggaccgctgatgtctcgatacttcaaatcacctaccgtaacggttgtactcgtacgggctgagttattcacttcctccagggtctgataaatgccatcacatacataaccataatattcattgaaaagaacgccggcgcgcttaattttaccattgctgatttgctcaccatcattcatataatcaatctttgaaaggaaatccgaaaaatttacattcactccatattggaggtcacctatccgatcattccatgccagttcaatatcataaccatgagtagacattttacccgcatttgtattagggttattgtatcccatgaagtaggggatctcaattttcagtaacatatccttagtttgtttccaataatagtcaaagtggaactgcaaacgattattgaagaaatttgcatccaaaccaaagtctgtgctagtagtggtttcccaagtaatatcttctacagccaatatagcgggacgagctgttttatcagaaacaacacttccgtcagccatataaaataacgaattgccaaaactcatcagagctatataaggaaagtaatcgtcaccaatacgttcattacccagtataccccatgagccgcgcaacttcaagaatgaaagccagtcccaattaagacttttcataaacttctcttcactcattacccaacctgccgagaatgaaggaaaggtaccccaacgataacctttagcaaaacgcgaactaccatcgtgacgtatattagcctgaaacaagtaacgatcagcatacgaatagataacacgaccgaaaacagaatttgaagtatattcagaacctttaccgctattagtctgaaagtcttctgaaccaatattgagataaggataaccggtaagttcgtatttatcacgtgctgcagtcagttcttcatctttcatatagtagttctcaaaacccgccatcacagtgagatcatgactgccgaacgttcccatgtaattagcaataacctgactagtgacatgataatcatccttacgggtttccgtaagcgaattggtagtccaagtgctaccggagtcaaaataaccgccaaatgtttcgggatcatccgctaaagtatatccacacgaatttttaaatgcttttttcttttgataattaataaaaggagatacgatacccgagatacttaaccctttgacaggtttgaaagtgagcgagcctttaccagccacctgagtactgtgagcaacagaattaccaccagccacaagcagtccgtagggatttgaaccactcttacccgaagccagacgaccatcgtcccacgtagcgggatagatggcaggcatcttacgcatggtatcgaaaggatcataatttttagtactactcttagcatgacggatatttacgtctatttgagcactgagtttatcgttgatattaaagtcgttgttcgaacgaaacatataacgctggaatccacgaccatcgtaaagcccgtccacctcatcatacgaaagagtagctaccgactttaccgttttgttaccacccgatacggaaagagtgtgagtcatgcggggagcactcgacttcaaaatcaaatcagtccagtcagtaataggataatggttaggatcgacagcattatactttacccaattctttgtctgatcggccgtatattcctgaaaaaagccaccggtagggttatcgttgtacttcaattcgttactcatttccagatagcgggtaactcctaccataccgggttgtttggtaggaatttcccaaccaaattcagcattgtacttcagattgattttaccactatcgttaccgcgcttagtggtaacaaggataacgccagcagcagcttttgaaccataaatactagcagccgcagcatctttcaataccgaaatactctctacatcattagaattcacatagtcgagcgaactttgcacaccgtctactatcaccaacggactcgattcacccatcgtagtaataccacgcacacggatagaggtggcacccgaaccgggagccgaactattacgtgtcaccatcactcccgaaagtgatccctgcaaggcattggaaagcatggctgtacgtttgtttactaactcttcccctttcacagccgccaccgctccagtgaggtctttctttttcacagcaccgtaaccgataaccaccacttcattaagtgtcttactagcttcttccataacgacagcatacatattcttgctatctatccgtactattttatccatataaccgacataactgatgagcagttcgctaccttcatgaacatctatctgaaatttgccatcaagatcggtgatggtggccacatcactacccttcacacgaaccgtagcaccaatcatcggaagttcagtaacatcaactacctgccctgaaatatgctttgttttttttaccttagtagtaggctttggggaagaattaacagtgatagttacctgacggttctgaatgtaatacttcaaattagccagccgacacacctccgccaagatggtgtcaattgactttccttgcaattcaatatttaccttatattcaagacgctctttgaccgattggtcataaacaaaaacatatttgctatgcttctcgatatagtcgaacacttgtttcactgtcgaattttcagctttaagaatatatattccatttagcttctcgaatgaaacagtcgacgcactagaatagacggggacagatagcagtcctgccaaacagaaagcctttgcaaagcttgccaccttagttacgattgttttccgattcataatattaagattaataattagtatttattgtataataatttgcgatgaatgcaccgtacaccagtcactttccgatttcgagcgtaccgactttacaccatccatcgaaaagaagattcttgtcaactgccatcttcaaacccggttggtatgccttggtagtatcaaccagtccaatgagccacgtataacttcctttttgaagaccctccagactgatatttgtggtgtaatgaccatcacagccctgcacccaggcagagagatcagcctcctctgcaatctgctttttcacaatgctatgaccggtatccatcaaagcgatacagactttatattttcctttccactgaggaatgttggtaggacagtatccccaacccaaattacgccaattgtgctgcatactcaccagttcaccttgacgagccttattcacgaaactcaccttagtaggatagagacgatatcctccctcacgtacgaaacgatttaccaaatcgaaagaagtattaaaccatgaagctacttcatctcctgtacgaagatccatcatattgacatgagcattacggctttcttcatactcacccaaacgcacatcttccgaatgcccttcgcgatacttgccgctgggatcaatccagtaacgatggtgtgctccggtaatccatccaccctccataataatgggtagacgatagcggtaagcacgggcaaaatctttctcccattgttcataataaccggtcatgccgaaagcatcgtgacggatgatatatcctttggctatagccctttcgagtaaccgtttgctatcagggtgtggttttgcccaactaatagtatcccccaccaagcgatggtagtttatcactaacggtacacgtttgaaagcttttgtataaacatcggtaatccattcgaatacttcttctttttttgaataatcattatatttcacaccgtgtgcttccccccatttaccaagaccataggcatcaataaaatccactttatcagggtcgtcaaaagcaacggcaaaggcttgaaggaatttttcgtatttctgttggaatacggcatcgtcgggataaggcgaccatatttgggaattattaggatcctgaaaacccttcgcaccggcttcctttacatagaaaggtgtattctgtccctggtcgcggctgtctacattaatacggaaagccaaacgcattccacgttcacgcaccgaagcaagcaatttatagatacgtgagtccggatcgttccatacatactttccctctttactttcaagcatattccaattgatgcgaatataacatgtaccggcgtaatcgctcacacgaacagtggaatccccaccatttacgggcatagcatcatagcgttgggtctgccaaaagttttcatcccatgcacgtcccaagtacattacccaacccgtaaggggatttttgagtacagaagtagtatcaggctcaaaacatactgtttgttcaggcgccttcactcctttagttatagctgcttgtgtatgtatcgaaaaccatccacagagtatcagagctgctataaaaagcataaatgtacgtaacaaagtgtattttttcatattcttcaatggtattaaaaagcatagcttctccttacgaaaaagcgtataaacctcctctccttgctataaaggcattataaattttgataataagttcttatgtaattatttcattcagtagcaactaactacaaaagcagttacttcttcactaagtagatcgtatcaccatgaactttcatacgggtttgcgtcatggtttcaatggtttgcaaaacttctttcacacgattaccaagtatcagcttgccataaagtttattaaccgatatcttatcatcaggcagaatcgtcactccataataatgactgagtcgttgggtgacagactctacactttcaccggtcaggctaatcataccctgcatccaacaagtatattcgtcggtatttactaaccgcttttcagcgaaaccaccctcctgcaaattcaccatttcattcggtttcatacgaacccgatcattgtttgtcgtttttagttctaccgagccttgaactaatactacttgcgaatccgaagtatcgtagttgttcacattaaatcttgttccaagtactttcactctgaaattatccgaatgaaccaaaaacggatgctctgcatcatgtgccacatcgaagtaagcctcacctttcacatatacttcacggcaatcgccatcaaaacgtttggggtagcgtacaattgtccgcgagttggctacgatttttgtaccatcgaccaacatcagtgtcatcttttctccaacaggcacttccacctcttcgtcatatgagtcagccatcaattctgtaactttcatgcgggacaaaccgcccatcgcatcctctgtaattatatattttatacctattaaaaaaagcagcgtagcagctactgagccaatatacatcaaaacgcgtcgctgcctagatttacgttcatgttgatgcattttcaaaaaagcttttttcttaataccggagatatctatctcggccggggtactgtgttctataaatgacttcaacttgatgtcaccctgtaaatccccatatgtataatcattaatatctttatccatcttcaaatctttttatcctttcaatatctctttcctttttataatcttctcatgagaagttcccttctatttataaagacgcaaatgttagatttatctataggttgaaattctatttttttcttttagtgctttctttttctaaatcacccgtccacaagtctctttctcaaagcattcatagcatatcctatatgataattcaccgtaggtagcgagatttgcaacatacgcgcaatttccgcataaggcatttgttccagtttagccaaaaagaatacatgcttgcacttgggcggcaaactattgatcgcttcattcaagcattggagttcttcgcgcgaaagcatatcatccattggagtttgcatatcaggaaaagagaaatcttgaagctcctcaaaagatatctcttgattaccctttgcctccttgcgcaaataagagattgacttacgatatacaatcgtattcagccaactcaatatactggctatttctaaaagcgtcttacgtagtttccacacttcaaagaaaacatcgcctaccacttcttcagccatttccttattactaaggataccaaaggcgtagtagtataacttctttgaatatcggttcatgaaactattaaaagctagctcatcccctttggaaatcaacaaaagttctctttccaagtcttccatttaattagattactattttatatatttataggcgcagaattcttgtatatcatataggtagagctatataatattaacgttctttatcaataatagaagaagccatatcattgctttgaaacgaagcttgatatagcccttctatactcaacagttacaatcggaactgtataaagcagatattctatttttgggctccctctctatctctctatatataagggaacagattatctcaccattttgtaaatttcattgcccgccatcaaaaaagcaccaactccataaacctccgtcatgtcacgagtcactttcttcgggtcagcaccgatttgctgcacataacccaatttcccattcggttccacagccgagactaatgccttccagccttttaccaacactggaagataggtttccttattcaataaaccttcgtttattccataagcaatggaatagacaatgaaagtagtacaacttgtttccggtgatggataagaggcaggatccaagagactggcatgccagaaaccgtccggatgctgcaatccggcaacacgggtagccagttttacaaacaattccgtatagaatttgcggttcttatctttcttgggcagttcctttaatatttcaaccagaccaccaagcacccaaccgttgccacgtccccaaaagactttcttgccattggcttcgcgcttatcaaaataacgccagtcacggtagaacaaattttcttctttatcgaacaagtaatcataagtcgctttatactcacgattcataaatttgatatactttttctctccggtcagcatatacaatttggcatatacagggggagccataaagagagcgtcacaccaagtccaacgttccaaggtctttaagtctccctccaccagcttgaaactgccttcagagggatgattgacaatccattccgtacgggcgagcgtagggataatcatcgcttcatctttgtacttgcggtataaatccaaaaaggattgtgaaacagcgatgtcatcagcatgataaaaccgtttgtccggctgccaacaattccgctgcccgatacgagtcagccacttataatatgtatcatcattgtcttctttttcagctaattccgcccaatccatcatgccgacataaagagcgccttgcggccagttcaagtcgtcatgttcaggagcggggtgtggattggcaatctgccaatccgccacctttcgcatgatagacttaatttctgctttttgaaaaggaacttctgttgcttgtataaaagttacacataacagaaacactcctagtaaaagtattttcttcattatatattcatttattgatcactaggctattcaaatcaaccgtatttttcttaaccggttgacaaccgagcctgtaaaagattcaaattaatccgttaattctatcttcactttctggtcttttacctgaatatagtactctccagcttccagaaaacgttttccatttccgtctacaaagcccaaatcacgttccaaatctatgtcgaaacgaaagattttcgtttctccggctttaatagattgtttttcaaaatacttcaactcttttacaggacgtgtaattgagcaatatggatcggagatgaaccaatgtaccgtttccaaaccatcacgtttccccgtattagtaacagttacctcggccgacaatttctcgccgcgctttactttagaagcggaaagagtaacaacgccatatttgaattcagtatagctcagaccgtgcccgaaaggatacaaaggatcacttgttatatctttatagaatccttgatgaccacgtccgcttttacgacgattataatagataggaatctgcccatttgaataagggaaagtcatagccagtttaccggaagggttgatacgtccagacaatattccagccattggaagcgcaccattcacacccggctgccaaatttccaatatagcatccgaaatcggttccaaccggttcaattccaacgggcgtccgttcaccaataccagcacgatgggtttgccgactttcttcagctcttttgccagttcttcctgaatttgaggcaatgcaatagaggaacgagaagcattctcaccactccaagtcatcatttcgcccagacaaagaacaacgacatcagaccaacgggctgcttctaatgcttcttcaaaaccttttcgattatccccttgtgttctacaacctaatgcataacgcagttcagcttttcccacaaactcggttgccattccgttatagagcattactacatccgtatctttcccatgtccacaccaagaacctaataagtcccagccattttttgccatgggtcctactacggcaatcttctttttatctgtcagtggtaatatctgattctcatttttcaataataccatggattcagccgcaagctgggcggcaatatccatgctttgcggacggaaaaaacgttctttctcacttgtaaccggagtatagggacgttcaaacaaacctaaacggaatttcactcgcaaaacacggcggactgattcatccacttgagccatcgttatttttccttcttcaactaactctttcatatggcggtcgtaagcatgagacatcatatccatctcaagacctgcattgaaggcatacactgctgcctcttttttattagctgccagtccctgatttttcagttgctcgattgctccccaatcggaaacgatgaagccatcgtgtccccaacgttctttcagaatttccgtcatcgtatagtgattggcagatccagggataccactgatatcattaaaagaactcatcagagtcgctgcacccgctttcacgcccatttcataagggagcagataagtatcccaaagagtttgtctagagatctcggtataaacataatcacgtccggcttcggaagcgccataaccgatataatgtttcaaacaagccgctatgcggtcttcggcagacatatcatctccttgataaccacgcaccgatgcagcagcaaataccccattcgtatacgggtcttcaccgtatccttcggcaacacgtccccagcggggatcgcgcgctacgtcaatcatcggtgaaaatgtccagtccacccccgacatacgggcttcttgcgcagtaactgcacacgctttttctaccagttcaggattccaagagcaagcctgtcccagagaaataggatacacagtacgaaatccgtgaatggcatcgtaaccaaaaataataggaatgcccaaacgagattcttccatagccttcttttgcacattattacgcaaagtaggattggtatcgtaataaatcaacgaaccaatttccgccggaacttttttaacctcttctcctatattattcacattgttattccgccccatggtatattgattcagttgcagaattttctcttccaaagtcatgcgtgacaacaaatcatcaacccgtttttcaatcggtactttggcatccttatacaaaggaatactttttttatcttttgccgaaagggcacatgttacttccaacaggcataaaccgaaaattaatacttttcttttcattatggtttcatcgattagttatcatttttatttttcaattgattttaaacttatcgtacggaaacctcaaataacttcaaccagccagcagatgttacattatttttcacagcaagacgaattccaatttcattctgtttagttgtgtcaacaataccaacagcccacatgtatttaccagccctcacacctttaatctgagttgtaaacatataggatttagccgtacctttcacccaatcacaagcttccggttctccatcaacaaatacatacttcggtttatcattcttggtgtccaataaagcaaaagctactttatatttattcttccactggggaatatttgtcggacaatatccccaaccaaaattattccaacgatgggctatttcaatctgtttaccattagagatagttgtaggcaaagaaatcctgtccggaaataaacggtagcttccttctgtacagaattgtttaactaattggaaagcttcattaaaccatgaataagcttctccattatgaaagtctgaattatagcgtaaatccatcatattgacgcaagctgttttagcctcatcaaactcaccttgacgtacttctgcataattagcatatccatctcccagaatcgagtttccatgagaatttttcacccagccaccttccattactacaggaacgagatacttccacttggctataaaattgcgttcccaagtagaatagtaagttttcataccaaacgcatcgtgacgtaatgaataccctttagctactgcttttcctattaatctttcagtatctttatcataattattgccgtcccattccttacttgtacctatccaacgatgataatttacaaacacaggaactttatcaaatacttgagaatataaatctgtcacccaatcgaaaacagcctcacgagtcggcagttccggttttcccaactcacgcacctgatagtaccatacactatgatactctccccattttccaaatcctgaaccacttacaaactgtactttgtcgggatcattaaaatccttagccaaagccctgataaatttctcataatatttctggaaaataggatcatccggatagggagaccatacttttactgaacctgtttgtgtttcatatcctttcgcgccagcctcttttacaaaattcggagtaaaattatagtgcttatcacggctatccaccacaaaagtaaaggccaatttcatatttctttgcttagctccctctatcaacatcttcagtcgcttagccgaaggggtatcacaatcggaattccatgcgtattttccttcttcaggattaaaatcagcccaggcaccacgaaggtataaggtatttgcataatcagagacctttacagtgccttccgatgacgggaaattatcataatcctgccagaatgtggaagataaaccatcaccaatacccgcatataatacccatccggaaagaggattatgcaaaatgatatttcgattctgctttaccgtgacaatgctgttcccaggaatagaagtatcttctaccaaaccatcatcaccattatcacctccttcttcatcattatcactgccgcaagcgactaatgatatagccatagaaaaaataagcccgcaacttatttttctcaaactgcacatattttgaaaattaatcttcatacctatagctcttatttttttatgcttactttcgacaattttaaccagcccgaatccaatatatcccctttggcggcaatatccagccctacgagatctttattactccggtcaaccaagcccacagcccaaacataagtacccgtttcaactttggacatatccggctcaaatacatattcagcgggacttccttttatccacttggataaatctgtatccatatccacaaatgtatatcgcacctcattcgtttcagaatcaagcaaagcgaaagctactttatatttttgattccattgcggaatattagtaggacagtacccccatcccagattgttccagcaatgtttaatagtcggcgttgtttttttagagacttctaacggcaaagagatttcactgggatagagcctataccccccttcccgaaggaatcggcgtactaaatcaaaagcatctttaaaccaggactctgtatcaccaaaacggaaatccatcatattgacatgtgcctctttactgtcatcaaactcaccgcgtcttacgtcctcgtgtgaattcttgcgatatcctctaggatcctgccaataattatgtgatttgacaatccagccaccttccataataatagggcatatattacgatatttttctgcaaacctacgttcccaactgccataataggttgtcataccaaatgcatcatgacgtaatgaatatcctttcttgattgcttcttccagcatttcttcactgtcagcagcaaaatgttcatcatctacccaatcttttcccgcaccaatccatctatggtagttaattactaccggaactttatcaaaagcttgagaatatatatctgtcacccaatcgaaaacagctttctttggagtatcatcacctgttgaataaatcattgtatgatattctccccatttcccgagtccgaatccatctataaattcaactttcgaaggatcgttgaaatctttagccagggccttcacaaatttagtatagtacttctgaaaaactggatcgtcagaataaggtgaccatttacctttattcataaatccttttgcaccggcatcttttacaaattgaggagtaaattctgttctcttatcacgactgtcaactacaacacgaaatgccaagcgcatattccgctgataagctccttcaatatatgctctcaaattagaatcaattttccaaccatatacatcttcctgtggattaaaatctgtccaactagcgcgaatataaagcgtatgagcataatctgtcacactaacattgtgtcccagttcaggaatatacatatggtcatactgtgcccaaaaatctgcagcatccactcccatacttgcatagagcacccatcctgtaagcgggttatgaagaatacgcaaagaatcaggctgaatcataactatgttattctctgatagttccttatcaaatgaaacggctgaattctcgtctccgaaaacaggagataaaaggaacataaacagacaaagagacacaattactctataataactaatctttcttacaaccatactactaattgttttttaaagagtgctatatcattgttctctttattcatataaaaatcacgagattgatatagcactcttaattttatcctgcttgattatctcttatcaaagaatactgtcagttctttaatatctaattctatgtaattaactcctacaggtacactaaagaaagcatagcggttgttagcttggccaccgactacagtctgtttttgattgtagtcactctctgcaatatcaaggcaaccgtcataagatcctctgatggcatctgctgttgaaccaaaggtatagcaaccggcactttgcggtccgactttaaagttcaatccacccggatgtgcatttccatctttgtctttaatggaattctttctgggtaactccgctcctttgtatataaacaaatatggatttgccaaactaggtgtcatagaatgagccatagtgaatcctgtatcaccagtgccatctttagcccatccatcgtatggtccccaaataaagactctttcaatagtggtagtcaccgtattattgttccatatccacgaaacaaccatgggtttaggatctgtttcgggggagtaaatcgtaacctttttagtatttatattaatcacaacacgatagacacccgcagtcttaatattccaatgataagccagtgcagctgcttccgggctcattgtcgagatattcattgctgtgccatctgtaaaatcgcctgattcttccggagcaatagccatatctttctgtccgttaaacaagattgggaaataaatagtacctggttgcagttctgcatggaacgcatattgattttcatcttctatagtgcgagtcatctctacatctgcgctaacacaagttccggcaatatagattttatcagcttctataaaattactagccaaacctatagtaacggtacgtgtttcaaaatctaccactacacgatactgcccatcttcaggaatcacccaatatccagcattatctgtccccttaattttagcttccattgctccatcagtaatctgttgttctgcagcaactggtgaaatggcattaatcttattttcatctttccaaacaatcgggaagtgaaggttacctgccttcaagtcacaaatggaaacataacgcttcggctgactttccattggcaagatttcaatatcttcaccatcaacagctgtgcctgacatataaagatggtctgctacaaaagtcttttcagaatacatttttacttttatagtaactgtagaaacttccggttttacaaacttggggccttctatagaaccgataatacgggcttgtaactttactaaatcaccaggatgctgcttccactttgacaccaataaactctgcaattctttatgagtataacttttagaaaaatcatcatcaatatactctcttatcattgtgtttgttccaaaactgttattttccagatccattttataaagataagagatataatagtcagagcctattggatcagcttccgtccagtttaacgtcaatgcaacctcatccggggtgtcttccttgagttctatttcataatcagaaggagtcaggactaaacttgtacgattatcgagcaaatcagtagtatcgtcatcatcattacatgctaccatgaaacacgaagcaagtgtcaggaagaagaaccgtaaaaggttcttcttaaatatatatccgtttttcatatctatattcaatatattaatattataactatttattggttcccgacggtccagtcaggagtttgtaccaaattccaattcttatcaatatcgtcctgtggaataggccaccaatagcttataaatttacgtgtctgatatactgtacgagtataatatttatttctatagtccgcatcggatactttaatataagcattcatgccataaaaatcaccatccaatactttctcggctaatttccagcgacgcagatcattaaaacgaagtccagattcacaattcaattccacacgcctttcttgacgaattaactcgcgcatttctacaggatctgatggggctgttatcttgccttcttcagctgaagcactatattcgggaatacccgcacgctcacgaatcaaattgacatatttcagaatctctttttgattagcagtataagtgcccttctcaatgctatattcatttaacgcctcagcataacttaaatagatctctgccaaacgacataatgcaccatgacggtttttataatctccactgccttctttgggatttgcagatgggtctactctcttacgtaccagatagccgctccatggagcgtcgtgagagggaccaccgtctttaccatccatataaaagtcagtatttctcttaccaccaatatgccattgctcgttatgcagtactgaaatataaaaacgaggctcgcggtcacaatacattttatatgtattagcgtctacaactacattttcatctttattacgatctccttctgaagacccatactgccactttgtagaataagtctctttttgcgtactaaagcctgtctctgaataattagcatcagggttaactttaggagaaccatccgaattatagcctataataggtctttgaccgtttctcatgaaaaaagcatcaaccaaagattgggttattccgattgctcccacgccattaatacccaaaccacgtgggatacagtttttatcataccatccaccggaatccattgtacgaacaaacagtaattctctgttggcttcattccatctcttcatcactgcattctgataagaaaggaaaggatcaatatcaccattatccaaatattcataatgcaaatgatagccagcggcttccgcctcatcgataaccagtttacaagcatctactgcccttttccatcgttccggatcatgtacagaattaaagataggggttccatcaatgttttttatattcgccaatgcaggattaccattcaccaagtcactggcagcaaataataacatacgcgcacgcattgccaagcatccgacagaagttacacgaccatatttcttatcttcagtttgagtggcaggtaattgttttgaagcttctaacatttcctgatctgcccaatcaattacatcataaaaaggctcttgtttcaacatcaagtcatcagccgaagtactctcactggcctcgcgaataatagggactgcaccataagctatagccatcattgaattataataagctataaaaaaacgacattctgctttcataaagtctacttcttcaaccggtacagcctctagtggatgagcatgtttaataaacaaataagcagagcggatatattttggataattattccaataagtaattactccaggactgtctgccgtccagttacctttttgatactgaatggctttaaatccttgtgcttcccaaccaaccgaaggaatcaattcatcagctatggcatctggaccatcataagtataatattctggtaggccgcgataaatatatgccagccaacgttccatattctttttattctcaaatactgattctaagtccaactgatcgtcaggttgcttatccaaataatcagaacaagaagaaaagacaaatattgtaataatacttaatgctataaattttaatatgctatttttcatatgcgctactattagaatttaatttcaaaacctgcagataacgatttcataatcggatatgcagcccccgtattattttctacttccggatcccacaaatcaaattttgaaaatgttaaaagatttgttcctctcacaaaaaaacgaatgcctgatattactgtagtatttctccacaaattctttggcaaagaataaccaagttcaatgttttttaaacgtaaaaaactcatattccgcagccaccatgtagatggttggttattattactatttataccatcatccaaacgtggataaaatacatcctgacttggattgtctacagtccaacgatcatttgcattagtaaacatattgcctgtcactcctctattggcacccggaataatgcttgatcctaatatattccaactacggcctattccttgaaaaagagctccaaaatctagatccttgtatttcatattcagtccaaagccatatactatctccggatcttttgttcctccaattggagatttatcaaatacatctactttaccatcaccattgacatctctgtatctgatatcccccggacgtaatttacctacaaaactttgagtcggaattccttctttcagtttacctgtacttacgtcttcaaagtcgtctgccgtaaacaaaccttctgctatatagccagttaattgtcctaccggatgtcctgtttcagcacggttagtaccaactactgcactaggttcatccttttctgttatttcattatgagcataggtaaatgttcccattaagctgacaaataaatccttgccaaactgtttattaacatttaaagaaacttctacaccctgattagtcacttttccaaaattcttccaaggctgcttcataaatccagctgtcattggaacagactcacgtggcataaatatatctttacggcgttcatcgaaatagtctaattgcaaatcaatcataccattcagaaaacctagctcaacccccaaattcatcttattaacaatctcccatgtcaaatcttgtactgcaaactcgccttctgccataccagttaagccataactgctatccaatccccatttatacatgtttaatgtctcatagtcatcggtaattgtagagaggtatgcaaaacggcgtccacctaaattagcattacctacctgaccataggatgcacgtaatttcaatttagatatgactttacgcaatggttgcataaatgcctcttccgatacaatccaaccaatggctcctgaaggaaaaaaaccatagcgcttacctctagcaaaattttcagaaccattataaccaaaattaaattcacctacatatttacctgcataggtataagatgcacgtccagccaatccctgattacgatatggcaacttacttccatcatcataattacgacgattaaacaacaacattgcagcaacagcatgtttatcagcgaatgtgcgatcgtaagatagagtagcttccatatatacactcttgttcccatagtcaccactttttgaatagtccaagaaatttgtgccattggattttgatgctataatcaaattaccttcatcatcacgtccagttgcaggtacataataatccggtgtcttcccacgagaaactgtacccgaagaaaacctatcaaatgagaatgttccttttagtttcaatccaggaagcaaaaatttcaaatcttgttctaccgaaaacaatgtttcgatcttactgtcgctttttcttttatatccactttgagtagcccatgcccaaacatttggttcttctgttgtcggaatctgtccactagaatactgtgcagggaaagcatgcggaacagcaacaaacgctttctgaaaaatttgagatatatctttcgttgtagaatttctatcttgcaaatatccaccaatattaaaacgcaattgcgtagttggacttaatttcagatccacattcgaacgcacattataacgttgcaatttaatagtaggatcccaatcatagcttttatcacgtttcaaaataccacgttcattatacgcagcagcaacaaaagaataacgtaatgtctctgtgccaccggatatatcgactgttacacgctgattcgaagcataatcatttgtaattgcatccatccaattcacgtctggatataaatccggatcataacctgaacgggtttttgcaatgcgatccgtatatttaggttgttgccctgtatcaatcaagatatcatctaaaacctgcatataatccgccgcacccaaatactcgggaagtttaaccggttgtgtagcggcaaattcagcctttacagtcacacgaggtttaccaacttgtccacgtttcgtattaattaaaataacgccattagctccccgtactccataaacagcacttgcagcagcatctttcaacacagaaaaagattctatttcttcaggatcaatattattcaaatcacgttctataccatcaatcaaaaccaatgggttttgtccggcatcctgaaatgtactaataccacgaatccagaaagaagagttatcatatcccggctcaccagaacgttgaacagctaatacaccggcaactgtaccagccaaattattactcaatgaacgactagtagacactttcaattttgccggttcaattgtggtaatagaccctactacagattctttcttttgtgcaccataagctactaccaccacctcatccaattggcctacatcctctaccatttgtacattaacaacctttcggttatcaacaatttcctctttaggcacaaagccaatataacggaaagaaagtactgactttctcgtaggaaccataatgctataattaccattcatatccgttaatgaatgcactgtagaatcattcttcaaaatgattgttacaccaattagcggctctcctttttcatctgatacgttacctgttaccttaatacccttttgctgtgcagtttgctgcactttaggagcttctgggaccgaaatcgtaatttgccttcccgacatcttataattcagccctgtctctgaaaacaattctttcaacacagcatctattttcttattggaaactgaaatggagactttattattcagatttttttgaacattcgctgaataaataaaaatgtacttactatgtttttcgatataatctaagatatctttaactgtggtattctcatattgtaccgagaacaaatcttcttcggaattccatcggatagaattagtaccgaacgaagaactaggaatcataaaaaagacgtttataatacaaaaaaacttaagtcttttttttaagtgtaaaaaaatacttttctttaccataaaaatttctttttaggttaacaattttggattgattgatttaacgaaggaattactatcgggtaaatacggcaatatttatccgattttttgtgtcatgatgataatctgttcttcataggcaagcatatttaaaagattaattaaaaagttattatttattcaagtatatactagtatctcttttttctatcgtaaatggcaatgtttgctgaatacattcaatcacctcatctatatcatctttcaaatctagttttccatagaccttctcactacctaccaatggatcacattgtatggatacaccataataaatgcttagcttctgaataatctgcgataaagtattgccattcaacagcataattccatctatccaactaatatattcagctacatccacttgcttctgacagacaattgaaccatctgctatattcaataaatcatgtggagccaattgtgccttcttctcattcttatcagttacttctactgatccttctaccaatacaatattggtcgcacttccccgataattagaaatattaaactttgtaccaagtacccgtaatttaaaatcctcagattcaacaataaaaggatgtttcttatcatgagcaacctctagaaaaacttccccttgagtatatatcttacgaatgtcacctttaaaacgacgaggataaacaactttagactgggagtttaccactagacgagtcccatctgacagctctattctagccctcttacctgagggaacaattaactgattatattcttgttcatcttttaccttttcttctttaataacctgagaattaaccgcaacttttccttcctttgaatacttaataaaggcatcttcatctaagttcaattgttctttagcagttatcagagttacttcatcaacagtctggctatctagaccttctgcaatagcttgtaagtctaaatcgacaacagtttctagattcataaaataaatagttgacatacaaatcagaatagaagcagcaatagaagcggaagttatcaacaaatagttccgtttgcgcttcttttcgcttttttgtatcttcatacgagttctctctataatggaagaagcatcaattttctcttgttcgcagctttcccaaaagaacctcagcgtctcaccttcaggcatagtggtaaaatcatcctcaagtttttcctgagaattcaacttaccaaataaatttgcaaggcgaaagtattctttcaagttcataatcttttttaatgttgttctataattaaagacgcaattaaaaaaagaatctcctagttaaaaatgaacttttttctcatttcatataaaaaaatatataaaacagatttgtctcacgaataagctattgataatcaaataaataaggcaagaataaaaatattattctcaaaagcgaatatttagtttcttagcaatttcttccaatgcaaaagctatatgattatttatagtcttcacggatatatctaataatgccgcaatatctttataaggtaggccttctatttttgccaagaaaaaaacatgtttacatttcggtggtaactgttgaatagcattgtttattttctccatttcttctctgctaatcatagcctcatccggtgattggattggggcaaatataaaatctcctatatcatcaagcaataaatctgcctttcccttctcttttctcagataagaaagagccttccgataggttattgtttgtatccaagcattcatattttctatgccagccaaagttcttctatttttccaaacttcaaagaaaacatcacttacaacctcttcagatggctccttttggccaatcaaagcataaacatagtgatataaacgtgaggaataatattccataaaacggcaaaaagccgcttcatcactgtttacaattctgtctatgtcattactttcaagtttcacggaagtgttttacagattacttctaattaacaaaattgtgccaaatatagtagtatattaggaaatataaaaataaaaaccgaattaaaagttatcaattatagaaaagtatatacaataaatattacaaaagtcttttactcaaatatcgcaccggataccatacagaaagaaagccgaccgttagaaccgtcacaaagataagtagcacatcccaagcgtgaacactcacaggataggcatccacaacaaaagtaccaccgccaccacctaatgagataattccgaattcctgttggatgaaacacaaaagcaaccctaaaacaatcccggaaacggcaccgaaaagagaaataagacgaccttcgaataaaaagatacgggagatcagtttatcatccgctcctaagctacgtaatgttacaacatcatccttcttgtccaaaatcaacatagaaagagaaccgattacattgaagcaagcaatcatcaagataaaagtaaggaataaataagagatcaatttctcgatctccatgatacggaaaacatccgcttgctgctgatagcggttctgaacgataaaatcattacctagtattttctcaattttggcttgtacagatgaaacatttgcaccaggcttcaatttcaattctatagcggaaacctctgttgtataatccagcagttgacgaagaaaatcaagagaggtaagaatatactttccgtcatattcctgctgattgacaacgaagacaactccgggagaataaagataatcacgattaaaggaagcacccggatttgccatatttactttagcattccgtttgggtaaatacacttgaagaggatcaacaaattgaagtcccgtacccaaggttgccaccaactctccccccatcacaccgtaattcacaatagaatcatgaagaagaaaatcaccggctccatagagaatactatcaatggctgtcaattcttcaaaattatcctctaccccctttagaacaaccatagcttgacggtctttatattgtaccatcgcattctcttcgagagtttctgtaaatacatctacttcaggaagcaggcaaactacgccaatccgtttgtcctgaccatcaaagactttcccctcacgaacagtaatttttaattgcgggtcgaatgctgtaaaaaagctggctaccatatcctgaaatccattaaaaacagaaagcgtgcagaccaatgcaagcgtagcaagagctactccgcacacagaaatgccggatatgatattaatggcattatgtttcttcttcgaaaaaagataacgccgggctatataaaaaggaaaattcaactctgcaacaaattatttcatttcagcaaagaatcaatcttctcaatataatccaatgaatcatccacaaaaaacttcagctccgggataatacgtaactgatggcgtacacgggttccaagctcatagcgaatggtcttcatattatcattgacattcttcactatttcttctgccttctcggacggaaagacactaagataaacacgggctatactcatatccgggctgatacgaacagcacttacagataccaaaacacccggcattgcttttgtctgaagcagaaatatctcactaagctctttttgcaacagtcgagatatcttattctgtctagttgtttccataaatctactcctttatttctttcttataatcgttaacccatcacgtaagggcaatatcactttctccacccgctcatcttttgctacgaaatcattgaatgccttaatcccgatcgtctgagtatcagcactacgaggctgttccaacacatgaccatcccacaatgtattatcggcaatgatatatcctccttgtgagagatgcgccagcgtcatttcgtaatattcaatatacttgcgtttatctccatctataaaagccatatcaaaaataatccccaaatcgggaaccaggctcaacgcatcacctacataaaaacggattttatccgcaaacggtgattcctcaagccacggacgagtaaaatcttcttgctcatcatttatctcaaacgtatgtaacattccgcccttctgaagcccttcagccaagcaaagggcggaatacccgctatacgttccaatttccaatatctggcgaggccgaatcatttccacaaacattttcaacatccgcccttgcaaatgcccggaagccatacggggacggagtaattttacgtgcgtatcccgatagagtgctttcagatagtcattctcgggatcaatatgctgcaaaatatattcgtctatagattcagtctcttgcatatagctttttacaaatagcggttattattcggcaaaacagtctcttccgcatgcttcaaagcatcttccaccacattgatttcgaggaatgaagtctgcgtaccttctttaccactactcaaatatcctaccatgtcggaaggttgcaagcgaccttccttcaacagacggcgtaaagcagcgaaatagtattcctgcccatttgccaattccggcatatagatcgcctctactccataagaaagagccagatgacgcatggtcttttccttataacatatagccaataccggatatttaccacggaaggcagccaaattacgagcagtacgtccactgtaactgtccgtaatgatagcacgtattttcagtttagatgtagccttaacagcttgtttagcaagaaatgccgtaacatcattactattttcatccaaaggaatgcgaatatcgttttcctccaacttatccttctcagcctgagctgcaatcttagccatcgttttcacagcttctaccggatacttgccataagctgtctccccactcaacatcaaagcatccgtacgataatagatagcattggcaatatccgtaacctccgcacgagtcggacgaggattattgatcatcgtatgaagcatctgagtcgcaacaattaccggtttcttagccaaaatacatttacgaatcaacacacgctgaatacccggaatacgttcctgaggcacttctatacctaagtcaccacgagcaaccataacgccgtcagccacttccagaatttcgtcgatattatccactccctcctgattttctatcttagcgataattctgatatcgctattgtgagcatccagaatttcacgaatatcaagcacatcctgacggttacgcacaaaagagtgggctataaaatcgatatctttttcaatagcataaagaatattgttgcggtctttctccgtcaaagaaggaagattgatacggacacccggtacattcacactcttgcggcttcctaaagtagcttcatttttcacctcacaaagcagataatcggcagtcttatcaataacctccaattccaggtcaccatcatcaatcagaatggtaccaccgatattcaagtcatgcacaaaattgggataagagacagcaatacattcgcgggtcgtttcaagttccggattaccaactattttcactttctcccctatcttatatggaatcggttccgcattagcagtcgtgcgaacctccggtcctttagtatccatcagaatcgcaatacggttggacaccgcacgcacatttgcaatcaaagcttcaaaaccttcacggctggcatgcgcagtattcatacgcaccacattcattccggcatcaaataattgtttgataaaatccacatcacaacgtctatccgaaatggaagctacaattttagtctgtttcaataacatagtctttctacctatttatatattataatctttatttattctctaataatgcctccaaagccaaacgatacgagttcaatccgaaaccacaaataacccctctacaggcacaagcaatcatagatacatgccggaattcctcacggctatgcacattagaaatatgcacttcaatcacgggagatgtcacagaacgaattgcatcctgcaaagcaatagaagtatgcgtatatgcaccggcattcaatataataccatccacgtcaaatccgacctgctggatgcagtctatcatttctccctcaatgttcgattgaaaatagtcgatctccaagtcagcatatcttttgcgaagctcagcaagataatcttcaaatgtaacgcttccataaatagaaggttcacgcttacccaacagattaatattcgggccattaataatttgtatcttcatcgcacaatcctgtttttttatacctttgtatccaaagaacaatatttcaaggtgcaaagatagagaaaagaaatggaaatcaacgaaaaaaaaaagaagaaggaacaacaagcgctgattatcagaaagtatcagcagtatcttaaattggaaaagtccttatctcctaacacactggaagcttatcttacagatttggacaagctattaagtttcctgaccttagaagggattgatatcttggatgtatgcctggctgacctccaacgttttgcggcaggcctgcacgacatcggcattcatccacgctcacaagcacgcattctgtcgggtatcaaatcatttttccgctttctgatcatggcagactatctggaagcagatcccagcgagctgttggaaagccctaatataggcctcaaactcccggaagtactgacagtagaggaaattgaccggatcattgccactgtagaccgcagcaaagccgaaggacagcggaacagagctattctggaaaccctatatagctgcgggctccgcgtttcggaacttgtcaatcttaaactatccgacctttattttgatgaagggttcatcaaggtagaaggaaaaggaaacaaacaacgtcttattccgatttcccccagagccattaatgagataaagctctattttacagaccggaatcagatagaagtcaagagcggacatgaagattttgtttttatcagcctacgaagaggtaaaagactctcgcgaattatgattttccacatgataaaagaactagcacagcaagcaagtattaccaaaaacatcagcccgcacaccttccgccattcttttgcgactcatttactagaaggcggcgccaatttacgggcaatccaatgcatgctcggacatgaatcaatcgcaacaacggaaatctatacccacatcgaccgcaatatgcttcgtagtgagattattgaacatcatccccgaaatattaagtatcggaaagaaaaagagtcattatttcattaaattatgataaaatcgcccccttatccatatatttatattaagaattaatatctttgcgttactttttctgcgtaaagtagaagaagatttgtgaatagacgatatttcaattacaaacatttaatttatacctaaaatgactaagaagttgtacttgcctttactcatggcaatggttgttgcattattctcttcttgcagcaaaaaaatgggtgaattatcagctgattacttcactgttactccgcaagtgctggaggcagtaggtggtaaagttcctgcgaccatcaatggtaaatttcctgaaaagtatttcaacaagaaagcggttgtagaagttactccggttttgaaatggaatggcggcgaagctaaaggccaaccagctactttccaaggtgaaaaagtggaaggtaacgaccagactatctcttacaagatgggcggtagctacactatgaaaacttcttttgactatgttccggaaatggctaagtctgaattgtacctggaattcaaagctactatcggtaagaaagtagttactattcctgctgtgaaaattgctgatggtgtaatttctacttctgaattagtaaacaatacattaggtaacgctaaccctgcattgggcgaagacgctttccaacgtatcatcaaagaaaaacacgatgctaacatcatgttcttgatccaacaagctaacatccgttcaagcgagttgaagactgctaaagaattcaacaaagaagttgctaacgtaaacgaagcagctaacaagaagatcagcaacatcgaagtatctgcatacgcttctccagatggtggtgtaagcttgaatactacactggctgaaaaccgtgagaacaacactactaagatgttgaacaaagacctgaagaaagcaaaaatcgatgctccgatcgatgcaaaatatactgcacaggactgggaaggtttccaagaactggtttctaagtctaacattcaagacaaagagttgatcctccgcgtattgtctatgtatcaagatcctgcacaaagagaacaagaaatcaaaaacatttcttctgtttacaaaactttggctgacgaaatcctgcctcagttacgtcgttctcgtttgactttgaactacgaaatcatcggtaagtctgacgaagaaatcgctaagctggcttcttccaatccttctgaattgaatatcgaagaattgctgtacgcagctacactgactaacgatcctgctaaacaagaagctatctatactcaagcaacaaaacaattcccgaacgattaccgtgcttacaataacttgggtaaattagcttatcaagctggcaacatcgataaagctgaatcttatttcaagaaagcagccaacgtaaacgcttctcctgaagtaaacatgaacttaggtttggtttctttgatgaagggtgacaaagcagctgcagaagcttacttcggtaaagctgccggtactaaagaacttggcgaatctatgggtaacctgtacatcgctcaaggtcaatatgaaagagctgtaaactcattcggtgactctaagactaatagtgccgcattggctcagatcttggcaaaagactacaacaaagctaaaaatactttggctaacgtagaaagaccggatgcttacacagactacttgatggctgttttaggcgctagaactaataattcttctatggtaacaagcagcttgaagagcgcagttgctaaagattcttcattggctaagaaagcagctacagacttagaatttgcaaaatacttcacaaatgcagatttcatgaacatcgttaaataatagaattaccactctattttaaatattaagaattgcctgtcattacaaatgacgggcaattcttttttttatctgcaaaaaaccgtactttcgcagaaaagaaataaaagcaatgaaaaagagtagcattttaatcctcatagccatctgtctattcggttgcagcaagtcttctaaggaagtaaacataaccggagaaatcgaaggattgggaacagatacactttatctatacggtatggacgaattgcacgaccaaatagatactattttcaccaaagacgacaagttctcttattcaaccccaatagacactattacctccgcttttctgctcattaaaaatcagatagaataccctattttccttgataaagggaataaaatcaaaataaagggagataccggcaatttgaaagtcctaaccatcgacggcaatatatacaatgaagagtttacagccttccaaaaagaactgaacggcttaaacagcccgtccgaaaaggatttagaacaaaaagcagaagaattcatacagcaacatcattcatctttcgtaagcctctatctactagataaatattttgtccaaaaagaatctccggacttcaataagataaaaaaactaattgaagtcatgacaggaatattgcaagataaattatatattgagaagttgaacgaaaccatatcccaagccgaaaaaaccgaaatagggaaatatgcccccttctttagtttgcctaataccaaaggagaaaaaattacccgcacatcagaagacttcaaaaagaaaaaccttttaatcaacttctgggcttcttggggagatagtatttccaaccgtcgcaacaacaatgaactaaaggaactttataagaagtacaaaaagagtaaatatataggtatgctcggtatctctttcgacgtggacaagaaagaatggaaagacgcaataaaacgtgacacgttggattgggagcaagtctgtgatttcagcggacttaattcagagattgccaaacaatataccatcaagcaaattcccgcaaacattcttctgtcggcagacggaaaaatcctggctaaaaatctcagtggagaagatttgaagaagaaaatcgaagaagtcgtttccgcagcagaagagaaagataaaaaagacaacaaaaagaaaaaataatcagtaaccaaacgtgttaatcaaagtattcggagcggctgttcaaggaattggtgcaacactcatcacaatcgaagtaaacagctcacgtggctgtatgttctatctggtcggccttccggattctgcggtcaaagaaagccatcaacgcataatctccgctcttcaagttaacggttataagataccgaccagtaacctgatagtcaacatggcaccggcagatattcgcaaagaaggttcagcctacgatttaccccttgccatcggccttctgggagccaacggaactatatcttccgagaaattctctcgctacttgctaatgggagaactgagtcttgatggaagcatacagcccatcaaaggagcgctccctattgccatcaaagcaagagaagacggatttgacggattgattatcccacagcagaatgcacgggaagctgccgtagtcaatcaactgaaagtttatggcgtcagcaatattaaagaagtcatcgaattcttcaataatgagcgagaattagaaccaaccatagtcaatactcgagaagagttctacgcccaacaaagtaactttgaatttgatttcgccgatgtaaaagggcaggagaatgtaaaaagggcattggaagtagcggcagccggcggtcacaacctgattatgataggtgcgcccggaagcgggaagtcaatgatggcaaaaagattaccttcgattcttcctcccctctctttaggagaaagcctcgaaacaaccaaaatacactccgtagccggaaagctaaaccgaaattcctcactaataacccaacgccctttccgagacccacaccacactatttcacaaactgccatggtaggaggagggagttttccccagcccggagaaataagcctagcgcacaacgggattttatttcttgacgaactgcccgaattcagcagaaacgtactcgaagtactacgacaaccgttagaagataggcgcatcaccatttcccgcgtaaaaagcagtatagattatcctgccagcttcacattggtagcctccatgaacccttgcccatgtggttattacaatcacccgaccaaagcgtgtgtatgcagtcccggacaggtgcagaaatacctgaataagatttccggtcctttgctcgacaggattgatattcagattgaaatcatcccagtcccttttgacaaaatctccgaccaacgaagaggagagtccagcgcatccatccgcgaacgggtcatcagagctcgtcagatacaagaaaaacgctatgctgagtatccgggaatctactgcaatgcacagatgagcagcaagctattatccatttatgcgcgaccggatgacaaaggactttccctgctgcgaaatgcaatggaacgcctcaatctttccgcacgcgcatacgaccgtatattgaaagtagcgcgtaccattgccgatctggaaggaagtgaacagattctttccgctcatttggcagaagccatcagttatcggaatctggatagagagaactgggcgggatagagagtcgccttccgctccatcttgtaaaagtaagagatacactatttgtatactataattacctcaatcccgaaagataccacacaaaggaaaacgttccatcaaatatcattacagctttgtacataaacgtatgatacatttataataaacttttgagcagtttattataaacggtatccaagtttattataaaatctcaaattgcgaattcgacttttatcgtctattttttacaacaaaaaaggctgcgaattttgtggaattcgcagccttagcctatatcagatattctatttcctggtatagtccaagaagagagagaacaattgtcactatattatactacttctatattcatttttatctaatttttcagttattatcaggcagaaatccatttccttgagctacaaagatacaacattaaaatgcatttgtcaagtccctaacaggtttcagcctgaaaaacaaaagaggaaagtgtccgaaaagggtttcctcttcatcattccgtccatctacactcttatttccagcaaatagactgcaagaaccacgccttattatcgtcattcaaaccttggcgtttcagaacttccggaaaatcattataacttttccagaaatcggaaactaaagaagaaatcttgtccggagcataagtaactgcttcacttaaacttcccatcttaccaaattcttctttaaagcaaatatatgaatcacgatatttcaactgctccatagatttggcaactcgtctcgatgctcccaataaaccgttcatatcagccgtttccgcaggataaactatcttaatgaccttttcctggtcgcaagacaaaatcggcaaatcgacagaaagagcaaactcttcacctaagtattcgtattttgcaggttgtccgttcacagtaacagattgcgggacaagcgatgagagcaccttcactttaaatgaacggaaaacaggcatatttttatattgtccttcacgcctaccaataacaattgtttgttcctgtccccggcgggaagccgtcagtttagtcacagcatattctgacgcataattcttatcgtttccattatcctcgtagaaactaaaggaagacgccccatttccaccggggaatacggtaattacaacttcttcgtcattgccattcaagttcattactttgcttgtatacattggcaatacagcgcctgcctttacataaatcggatattcgtcgatagcaaaaggacgctctacaatctgaccgcctttcagtaaagtaccggtatgcagttcataccactcaccttcgggcaaccacgcacgcacctgtacataaccatcctttgccggagccgtagcgggagcaaccaaaatatcatctccaaacatatattcactgcggaattcataagcctctttactttccggatagtcataatacatcggacggcaaagtgacaacccttcatcataccctttacgggccatcgtgtaaatatacggagccatctcataacgctgccggattgtcttacgaagaatatcacaatactctttgttaaacacccacggttctttattcaaaccggcactcttttgcgagtgcgtacgcataatcggacttagagctccaaattgcaaccagcgagtgtacatttccggatcgatactttcgccgatatgtccgcccaagtcatggctccaataaccatacaatacattagaagccgtagaattgaaataaggctgaaaatccaatgatttccatgatacaaccgcatcacctgaaaaaccgacctgatagcgatgatttcccaaacctccccaacgatggtacaacataggacgcgtatcccggttcttttccatattactgaaaaaagcataattaatccaccaggtattactcaaattcttcattttcgggtcatagatcccttgttgccaatccagccaccagaaatcaaccccgtctttctccatcggagtcaatacattcttgaacatattcttgataaacttcttatctgagtttatccatggaatcgtttgtttggactgaggatcaactcccatatcctttgccagttcaggatatttttcttcataagaagccactccatccgcagggtgcaggttgagggttattttcacgtcattttgtttgaggtatccgaggaatcctttcggattcggaaacaggtccctgttccaggtccaaccagtccaaccaccttttccttgttccgtataatgccagtccatatctactaccaatacatccaaaggaatctgatacgtatggaaattatcaatcaaattacggaattccttatcagagtacagccaatagcgcgaccaccagtaaccgaacgcatagcggggtggcaacggcacttttccggcaaaaagagtataatctttcagagctgctttataatcatgtccataagccatgaagtaccagtcctgcccgccattagccggacgctctttcacccaatcccaatccttatcattatcaaacagaagtccttgcgaatcatcgatgaaagtccagccgtccgtagccagcagaccatcttccagtttcagtttttcacccttctttgtatcagccacccaagtctgtgtctgcgtatcaccatccataccatccaatgtacgataagtacctttcaagttacccttctgttgcataccgggtttccaggaaaaaggcagcatttctttagctgcggtgataattaagttcttatccgtaaactgtccgctgtttttcttataacgcatcttcatcttagaagtcgttatttcaacccatcctcctcttgttttcagtttgtaatctacttgaggatacaggcgattgatagccatgtgcgatctgtcgtctacaaatttcccatccagagcatattccaagcggagagccccgtcggagatgactgtgaatctcacgttatcatccgtatatgcgatattccgttgtgtgttttgtgcttgcagtgcaaatagaacactttgtaaaatgcaaagcaaaattagcagtaatttttttttcataacatttttaaaacctataaaattaaaatccgagagcaaaattaggataattgcagctatatagctgcaattatcccataccaattacttattatccttgaaagcaggtgcttccgccttcacaaccggaccatctcctacgagataaggccatccgttgtcatcccaatacactctatcaagcaagactacgcgacccaaagacggatcggcagtgcggtaagcgtgatagattatccagtctttaccttcatcatcttgtactatttcagcattgtgccctgtacccaggaatgcatcattcttatgtatcaacacctcatgtttgttatcgttcatcttttcgcccgccttatttacataaggaccgaaaagattcgtagaacggcataccaccgtctgataggtactattcgcaccttcacagcaggtaccggtagaacagaacagataataataatcgcctcttttcaatatataggacccttcgtaagcattcgtgtttccggtgttggcagcaacttggatttttgttgctttcgcattctctattccacctttcagcgaaaggccatcctcgctcaactcaactccccaaataccataccagcttccccaaaacaggtacttcttgccgttatcctcgatatagaaagggtcgatactgttgtgcacgccaatctcattgctccggaataacttaccttggtcagtaaacggtccttccggtctatccgaaacggaaactccaataccacaagtttctccaccgccccatttggacaaagagtagtacattacatatttaccatcgatataattaatatccggtgcccagataccagcatccggctcccatgacggttttttatcttcctcataggcaccactcacataagtccaatgtaccagatccttagacttatgtatccatgtattacctcccgtagcgtacagatagaaatatccatcctctgcctttatcactgtcgggtccggattatcggagtctataaccggatttgaataccacactttgtcttccaacggtgtttgcaccgtttcacctttctgcttgtcactattaccgcacccccaagtgaatagggaaatcattccaagcgcgattatattttgcatatacataagttttgagtttttcttgttaattgttactattctattccaaatccggatttaactccacaccgggacccaatataatatcgatttcagaggtctttgatgccttagctgcttcggaagtaattggcgtaccatctgcctggaacgcttccaatgtaatgctcagttgagcttccttttcatccaatccaaaggttctcatgtattccattatttgccggttggtaaaaagcaactcacgcactccgttgtaggtcagtatactcttatcctctatatccagagttttagtcgtttctgcatctttttcccacgccaaagttataacatatttcgatgctgtttccatatccaaccaacgatatacaaaagcaaccccatttatattctcttgtacaatttgtacatagtaattttcagattccacttccactctcggtacacggggttgtgattcgcccgcaccttctacgtcaccgcatgctcccaatacaactatattggcaagcaaacagattataataaacagttttttcatgattttcatattttaataaactcattacgaagattactcggcaggattcagatatatcctcatttggttaaggtccactgtcaaggtgtatttaccatctgacgcaacgctccatttcaagtcgccaccattgtcctggtatctcgcttccccaagttcatgctctgctgccggattagctgccgcatgaggagcaaagaaaaatctaccaccccagtcaaggtccactgaaagtttgaattcattgctaccaccattataatagaaattacctgtataggtccaaagctcaggatggcgcgggtccttactttgcagagctcctttctctttagcaactcccaaatcccaacctacctcgcaggaattaccgacaatccaaataccatccttcggcaaaggatacaaactgactatgttaacatcaaatacgttcagatcaaccaccattgtatatgtaccgctctttgtattctccaacatctcataatcaccttcttccgttacatactgcaaagagttatctccattttcgcctttcatgtaacatggataatccgattctgcactgagcgcaaagaagtacttgcatggtttcaattctgcctgtgactggtagattcccgaaccgacaactttttccgtcattcttcgcatagacctttcaccatcttccgttatcatcaccatataaatcgcagtagcattcttatcatacccgaccacatcgaattgtgttttcgacaattccggtttcaaatactgagcagacgaattcacttgagcgattacctctgcctcgatagtaactttatctccgggaagtatgctccaagaagccaaaatatcattcagttcattatgcgtgaagctgatagagcgttctccggcttcaatttcatataagctagtgacattagagtgtaagtccgccatatacattctaaagaagtaagcaatattggcgtcagcaccgccacgctgtgctgcagcgttccacgtaaaagtaatcgcagtctcattctccttctctttctccaaagtaaggtcagcagaagaagtccttaatagcatctggtctgcaggcgtttccagtgtgtagtactccggatctttattacagctcgctactatcgatgccagaaagagcaagcatattaatttcattatcttattcataatcatgcttttcatttaattaattccagaaaggagcctgaacaaggttaggattcttatttatctcctcgaaatataccggcatccaatacattgcctttttccatacacgcgtttggaatacagttctcttatagaactcattactgttcgttccaccataattcatgccatagtcatctccacacatttcaggaagactctcaatgattctccaacggcggatatccgaccagcgtgagccttcgcaacaaagttcaacacgccgttccatacgaactacctcacgtactgccagttgattgtcatctacatgaatatatttagggtcatccaatgaaacagtattcaatgtatactgccgcacacctgcacgttcacgcaccttatttacatatttcaacgcttcctcacgggataccttattatcataagcctcattgattgcttcggcataatcaaggaaagaagctgataaacggtacaagaacatttgccgccatttataactgccattcttcggattatcctgaggatatacttttttacgaaccaaataaccattttgaggagcatcgtgtgtgtagtcgttatctttctggttcttaaagaactcatatttacgtccggctaaggcataccaagaaccattataactcaccgttgtatagaaacgcggttcgcggttgcaatacatattataagtcccttctgcagtcacttctcccttttgtcctgttccacctgtccactcagtgactcttatttctttttctgtagagaaacctccttccacatattctgcattgtcatccgttatcggaagcccgttcttcataaagaaagcatctaccagcccttgatatactcccaaaccatttccaccaccatactccttagtcacagccttattggtatagaactgataactttgataagcatcctgctttgtgtaagggaacagaatttccttatttccatcctgaaacttggtgaaccaaacattttcaagcgaagtgaaagggtcaatctctccttctgcattatattccacatacaaacggtatccagcctggtctgcctcatcaagcaaaagtttacaagcctcagcagcctttacccacttttcctgactgtaagtagaattaaacagttcttctccctccttattcttatgcccgatgtaccactcattaccattcacaagcggactggctgcaaacaataacatttttgcacgaatagtcagacacataacggaagtgatacgaccatatttctctacactttgccatacaggcggcaattgctttgccgcttccagcatttcattatccaaatgactgacaatctcgtcaaacggtctctgtcccaccattaagtccgaaagagtaaagtcagtaggagcaatgtaattgggtctaaaaggaatcggtccataagtctccaacaattgccaccaataataagctgcaaggaaacgcgcttccgctttcatataatccacttctttttgtgacagatcggcctcaggcaatgcatgcacccgctcaataaatatgtaagcctggcgtattttctgaggaagaccatcccagaaattgcccgcccattgtgtattaggcgtccatccaccaagaatcttagtgatattaggccagtcccactgttgccagcgtgcggaagcagtcaggtcatccgcaaatacttcccatccgtatgtattcaaccagtcatttcccggattaggaatacggctgtatacattagccagccaagattctacctttgtcttattttcaaagaccatatctatatcaatctccgtatccggttctttgtcaagatacgtacaggaacccaacgatacgatgcctatcaatccggcaaatatatatttcttcaaactcatgatcgtctttttttaaattagaaattcaggtcaactccaaacataacggaacgcatagcaggataacgcaaaccggtatcagtatccaattccggatcccatagtttgaacggagaaaaacagaaaaggttattaccgctcacgtagaaacgaaccgacttcgaatgtatcttctcggttatcattttcggcaaagtatatcccaattccaaagtcttgagacgcaagaatcgcatattctttttccaccaggtggagctccggtagttttgccggttaggctcttccgacaatcttggccaaaacacatcctgagaagaattctcttctgtccaccggtcattatagttggaatagacatttccttgcaacgtttgtccgctgcccggaataaagtatgtagtattaccgattacacgataagtatcgcctgtcccttgaaagaaaaaattcaagtcccagttcttgtaatttatattaccaccgaatccgtaaacaatacgcgggtctactgttccgccaatataaccttcatctgcatcagtaatgaaaccatcaccgttcatatccacatatttaatatcacccggacgaaccttggaagctcctacatcttgtgtcggtataccgaactttaaattaccatccgcatcaaagtcatctgccgtaaacagtctttctgcctgcaacccccacaaagtattcaatgaacgtcctgtcagccctttgtatgtacctaccacagattccggttcatcatactcgtctacccgattgatagcataagtaaagttagaacggaaacctataaaccaatctttattgatttgtttactataattcaaagagaattctacaccacgattagtcacttcaccaaagttagcccatggatttgtcaagaatccggtttgtgacggaataattttacgctgcatgaaaatattagtacgcttttctttaaatacatctacttgcagttccagttcattccataagcccagttctactccaagattcatttttaatgcagtctcccacgtaaggttttccactcctacttctccttcagaaatacctttacgttcaatctgccctgtatcaccccagtgatacgtgtctgcatctgtcttcaatgttgtcatataggcaaaacgtcgtccaccaatatcatcattaccaacttttcctatagatcctcttaatttcaatttactcaaagtatttctgaacttatccataaaaggttcttcggatataagccacccaactgcaagagaggggaaaaatccgaaacgttttcctttggcaaaattctccgaaccgttataaccaaagttaaactccgtcacatagcggctatcgaatgtataagaaagacgccccgcaataccttgctttctataaggctgtacactaccgttgtcaaaactttgctgattatacaggaacaatgcatccacatcatgttttccgaaagtacgtgcataagtcagcgttccttcaaagtagaccctcgaatttccatattcacctttattgccatgtcccaaagaatcatctccgtatttcaacaccgaatgaatcaggttaccctctatatcacgaccggtagcaatagtatagtaagtcgcattcttgcctctagttatcgaactctgattccagcggtcgaacgagaatgacactttcgctttcaatcccggagtgatcattttcaggttctgctcgacagcaaacaaagattgaatctgtgaggccgtaaccacatcatatccactttgtgtcacagcagcccaaggattgactccgttgatattcatgataggaattgttccgtcagagtaacgggcagggtgcacaaaaggagaagtcataaatgccctgtcgaaagcattgtccgtactaaaagcctgcttacggtgcgtctgcaagaaaccgccgacattcaaacgcagtactgtcgtcttggtaacatccaaatcgacattggcacgcatgttataacgggtcagcttcattccggtgtcataaggcaatgtcttgtccgtttccataattcctttctcaccgaaataagaaccgaccaatgagtaccggagaaaatcggagccacccgaaaccgttaaattagcacgagtagagtaagcgtaatctttcgttatttgatccagccaatttacatccggatacaaatcccggtcatatccataacgagtcctgtcaatctgctcctggctgaatggcaagcgtgtcctgtcttccgtaagttcgttcaataatgccatatgatcggctgcaccgataaactcaggaagttttgtaggttctgaaatagaatgttccacccgaaaattcacagaaggagcacctatcttaccacgttttgtattaataacaatcacaccgttcgcaccgcgcacaccatacatagcacttgccgaagcatctttcaatacagagaacgattctatttccgccgggtcgatatgatttagatcacgttcaattccatcaaccaatactagtggcgactgtccgccagagaaagaggcaataccacgaatccagaaattagaagaatcgtacccgggttcaccggaacgctgaacagctatcacaccggcaatttgtcccgccaagttattagtaacagaacgtgaagaccccacctgcaacttctttggctgcaatgtttcgatagaaccgataaccgacatttttttctgactaccatatcccgtaaccaccacttcttccagcgcttcaatatcttcctcaagaatcacatcaaagttaatcttgcttccaacttttatttgctgggttttaaatcctatataggaaatctcaattacggaactttttcccggcacatccatatagaaatgtccgtccatatccgttatcactccagtgcctccttcttccataacgcgtatattcacaccgggaagaggatttttgtccttatcggttatcgtaccactaatacgaatacctttcgcctgctccgacagattcgtcttaccagccatagaatgtacaggtaaagcggagttggcacttgttccatagtacaacaacaagcaaacaaacaatactttcttcaaatccataatattaaatttaaaaatctcataataaatactttatctctaaccgagtgagagcaaaagtaggcaaccaacacaaaatataataaaacaaacaattcaataattaaaagaatttgttcaaaatcaaattaaaatataatagatatatattctgacctatttatgtcatttcaagaaatactccgcacgccccggagtgaacaactcccacaaagaagctaccgtccaacccggtgcaaagatatcattataatatcccttcccgttttttccataatcccaatttgtgtgctgaacaacttccggatagtaaccgggcttagccactccgcataaatgcccctcatgaggcagaagttggcgcatagaagtagaaatgacttctgcaaattgcgagaagcggggttctgcatattcctttgacagccatcgcaacacagaagcaaactcaaacacaaatacatcaatatggttgttttccaccgacacattgccccagccgcgagttttcagaccaatatctcccaacatctgtccctgcgcgaaaggaacatcccatacataataccatgacaaggcaaaataagcagctttcttcgtcaggtctgcataatgccggtgctcgtctccttttgtaatcaatgaaagataataggtagccgtagcagcatacagagatgcctccttgtcttcgcagttggcatcaagtgtggacgagaaatagtcggctttagaaatcaatactttctccagataatccgcagtctgcttagcactggcaaggtatcgcttgtctttgaaatacttgtatcccattaccagcggcaaagtagccgaaggagtacttcccccactagtgtcaactatcgtaaaatcatcacgaaacttgcgagggaaactaccgtcagcctgttgcaaccgcaaaagtatatccagcatatttttcatcttctgctcccattcgggatgacgacgcccgttctctttttcataagcaagaaagtgcaacatagcatagattccttcggactgacggcgtatactgtgcacaggatcttcatagcctttatcaaaatcgaccgactctttgaagaaaccgaccggagtaaagccgtttttcaagtagctatcaaacactttcatactatttgctttcaaatcctccctatcagattggtgactatattcccaagcattgaatgcattaaggagcacacgaccaataaatcctacttccgcctgcccgttactctggcaattttccgtcattagatgtattcccgaattataaaccaacggatgtccttctacgaagctacttataaaaaatccgctaagaacttgcttcatatccgttatggaataaggagtctccacaggtttaggtccataagtgtcataactatattcccatgcatggcgtataaaatcagaataatcatcagccttattctcctgaatctcccatgtcagcagaacagtctccccttttttcaggaattgaaaagcttctaccgcaggtgccaatgtcagcttacgaatataactcttgggagcttcacgataaggaaagccaaaagagagcgcagttattccgtcttgattctcaaatccggtaaatcctagagacgttttacctgaaaggataatttctccttcccgatgagtgctcaaggcttcttctgcaaacttatcgatacggctcacagtcacaaagtgtttttctttttccgaataaacacccgtaagcggtgcgcttagcctgtcttcacgcaccaaccaactatctgaagaatggaacgaaggcgcatctttaggcgaacggagattccggcgataccagaaacccggcatataaaattgacaatcatcatggcgatagcctgttgatagccgttgactataattaaaataaatatcttcgagtgctgttatacagacatttacccgtaattttccatttacatctgccaccctctgagtgattgtaaccggaatgctttcagaagcttccaataaataggatgaacggttattccccaattgctgcaagttcagtgaatacctttcagctacatttcccggcactttcaacgatatggacgctgaaatattttccggaacatagttgacagcttcagcaactccgacatacagtgtaataagcgccccgcaaaacaaacatttaaaattcatgcaaacctgattatatgaatcagtaaaggatactggttctgtgttaatactaagttattactgcagcaaaaataggggtttgcacttatttcaggtattaaaaacaggtcaataaatgaaagtttagtctcaatcgggctaaatgaaagcagaaatcaacgaataatgtttcgtacagtgtgtatatatgtatacttcactacaccaagacttaacaatgttatttttgcatccggacataagtctttctatccggtcccactcctgttatcgtcaacttcttccaatgtttcggcagttttgagaaaagctgcttgatgccattatctgtaacttccaaaccacaaaaaccattaatgacagtttgtaaaagtcctcccgcaccagttacaaaataaggattcgtacctcctgcaccttcggaaataacgccaaacggaggtaactggttaggacggaaactttgcacaaacagttcataagctttatcgccttcgccaaggcgtgcatattgcaaagccaacactgagaaggacattgcaggtccggttttatctattttatcttcataatactccaagtccttacggatttcttcaggacgggttatcagatttaatggatataccagcaaattggcatccgcttgttttattgtctgcccattatagccttcatactccatagtcactccattctcgaatttcggaatccgtagttttgaggctatctccttccagattgcaggtgctttaacaccgcataccgcagcagctttagcagcatcttgcaatgcacgcatagcagcaccattggtaaatgcattatcatccaccccttcagcatattcatcggcacacaccacattgcgaatcgaataagaaccatcctcattattcttttctacacgacttacccaaaattccgccactttctccatcaaaggaaaaccttcttcacgcaaccaccgtttatcaccactcatacagtaataattccaggccgcgatagcaatatcggcagtgatatgatgttcaaaagctccggtcaaggcccaagtaggacatgactcttctccagcatcatcactttcccacggaaacatggctccctcatatccatagctcaatgctctctgacaggcggcttccagtctgtcagtacggtagtccatcattgtccttgcaatgccctgattcatgaaaagcataggcggatacatccagaactcggtatcccagaaaatatgcccgttatatccttgggcagaaagcccgaaaggagagatactcaaccggcttcccttgcgtgcattagagtaaagattataaagtgcaaaccgtacggcacgctgcgcctcgtcatctccctcaatcataatatccccttcccacagttcattccaaagtttccggtgtccatccatcaggcggttcaaaccttctttcgcaccataaatcacttcacggtccgactcattatacgggtctataaaatcacgtccggtacagacggagcctaataaagcgaaagaaaatttatctcctttttttaatgaaatagcgattcggttggttccgtcatattgttgctgcaggtttggatttttatcataaataaaagcggaagaagctgacactttctgttcacggtatttggacaaagcccaggtacgtactattttcagttcgtttccatcgacattcacactcacctgtttcgaaccggaattcttatattcatcaggtacttcaatgggattttccactgataaatacatatcttccaatgcagccacctctacacgcaccagtcccgcataaggcatattccttaaggcacagatactataagagatatccgcttttccaccataagtgaaatgcgtatcgtgcgtggcggctttcatatctatgcactgtccccatcccgagatattatcaccactcactccctgtccatcaatctgcatttgcaaattaaacgggttgattcctcgcaacacacggctcacatcttggggagcggcagcatcaaatacatgattcaacatgacatgacgaacggagaaaggttctttccacggtaatataccgataccgccattcgctactgctgcgccataataagttccttgataatcaacagcctgtattttccacaaactttcttgtccgtttgcctttatagccaaaactgataccagacaaaaaaatacgataaataaattcttcatataatagcatatttaattagttaacgacattttctactcaaaagtaaaccgctactcctttacattcgtaaagtcctttggcaacactccgaactgcttctggaaacattttgcaaagtaggacggtgaattaaatcctaccatatagcagatttcattgaccctgttttcaccctctttcagcagttgggcagcctttttcagacgctccagacgaaggaattcattcggactgagatccagcactcctttaattttccgatagaagttagaacggctcatattcaggttatccgccatgtcatccatactaaactctggattggcatagttcaccctgataacctcgttcagtttcttgataaactcttcatcggctttcgtcaatgccattgtattagcggctataaaaggagattccgcaaaagcctggcgcagcttctccctgttctgaataagattggaagcgcacgcctgcaaatattccacagagaagggtttttcaatataggcatccgcgcccagttccattccctctatcttcgattgtatattagtcttcgcggtcagcagtatgataggaatatggctgtaattcaaatccgacttaatcgtcttgcacagttcgaagccatccattacaggcatcacgacatcacttatcatcagattcacataattgccgtccagtacacgcaatgcttccgcgccattggtagctgtcagcaccgtgtaatctttcgacagttggcgaaccacaaaggcaagcatatccggattatcttccgctaccaacacagtcgggcggttatccttctctactgcttgttccgcaggagcttcgtttatcttgtcagttcccgcttccacttccgttgtcaaggtgattgtcgtatcctgtactatcggcaaagtcatacagaaagtattattctcctccccttttcccatagtcaaagtcccctgatgcagttcggcaagcgagcgggagagagccagcccgatgccggttccggtagtcacttttccatcctcctgctcgttgaaacgaacaaaaggcttgaatatctcctctttcattgcatcaggaatgattactccgtcgttcaccgtgcagatacggaatgaattgcctccgtccgtatccggcactgccagcgatatatgcacgtaactttccgcatatttcaccccattgttcagcaaattgctgatgattttcgtaaatgcttcctgattgatatgagcataaaaatccttttccggcatctgcaaaacaaaatccaaccctttctgcttggcaagggaagtaaagcgtttatgagtttctttcaagatttcggtaacattacattcagtaaagttcagtcggaatccctgtctctccgtcttgcggaaatcaagcaactgattggtcaggttcaataaccgctccgtattctgcttcatgacgttcaagtcctcacgggtttccgtatccacttgcttctttagtatgatattttccaacggacctttaatcaatgtcaacggagtacgtatctcatgggccacattcgtaaaaaagtcaatcttcgcattatatacttcgcgttccttttcctgttcgaatttctccatctgccgacgatgcttcctgttgctgcgtctcttgaaatacataaccgtatacagagaacaacctataatcagcaaagcatacacgatataagcccagacggaaagatagaaaggtggaagaatatgtactttcagggatattccctcttcattccataccccatcgctattagagactttcacccggaaagtgtaattgccataccgcaggttggagtaagtgacgatagggctctcgcctaccgtcagccagtctgcatcaaaaccgtccagcttatacattatcctgctcattctcggagcctggaagtccagtgccgccacacggaaagagaaagagttctgattggattgaagtacaagttcgtcggaaaaggtgatgctcttctccaacggagaacccggttcgcctacatacacttccttgccaaagagcagaaaatcagtaatcacgatagacggaagcgacttgttctctgaaaagttcttgggattgaaagccacaaagccgtcgatacttcccagatagatcgtaccgtcttccgtttcaaaacttgaacgataattgaactggtcgcccagcaaaccgttggaagtggtatatactttcatagctccggtggtaggctggaaacataccaaaccattattggttgtcagccagaaaaacccttctttatcttccacaatctgataaatgacgtcgtttggcaatccgtccgccagattataactggtgaaggtttccgtctccggatggaacaaacagaagccgccaccctgcgtcgtgagccagacctgccggtgggaatcctcgaagacactcactaccttgtcgtaaggaaggcttttcggattgctttcatcatgcaggtaattcttccatttcttctcactcacattataacagtaagcaccgtttgcataagttgccagccaaaggtttccgccggagtcttctttgatgtcatatacaaaccggccgttcagttccggaatccggtcaaaatcgtcggactgcttattataacgcagcaggccgaataatgtgcccaaataaatatctcccgtcgttgtccggcaaatggagaaaacactattatctatcaacgaacgcggcgaatctgttttccggtatgttttcacaatagctcccgtgcgtgtgtccaccactttcacccctttcgagaaagtgcccacccaaagatggtcgccaatcaggcacaatccgtgcacgttcgtaaaggcattgctcggcatgaagaaagagaaagtcttggtcttcgggttaaagcggttcaggccgccgtcttccgtgccaatccacaagattccctgattatcctggcagaattcacgtacccgctttccatgcagcccgttttctgtccctttcggataatatttctcaaaattcgtatagaaacgggggtaatagtttacgccgccaaaataagaaccaatccagatgccaccttcacgatctttgcacagcgaataaatagcattatcggacaaggagtaagggtcattgatcgaactgcgcaagtgaacaaatttccccagccggagattataaatataaagtcctgactctgcgccgatccacagctcattgtcggaagccatcagcagttcacgacaaaatacagattccccgttctcatctgccaagagcaaatcatgcaatttgtttgaggtcaggttcagttccttcactccacctttcaaagagccgacatacagacagttgtatgcccctttcgcaagacttatcactacatcgttcgcataggtttcttcattatctatcggagagcgataaggatggagcgttttcaagcggtctttcgaatagaaaagaccgtcaccgtaacagcctatccaaagggttccgctattatcaaaggcgaaagtctgcacattagtggtaagaaaagagaaattctctaacgtatagttccgaagtttctctttttccagttcatagcagaagagaccttgagattctaccgccacccagacacaaccttgattgtcgccggagattgcagtcacggtatgttctattttcgtattttccgcactcagttccgtgaaatgctcaaagaagtccttttccggataataaatataaagccccacatccgtgcctacccagatatttcctttctcgtcttcataaagcgctgtgatgaaattgttgccgatacttcgttggctacggtcatcgtgcttgaatttacggaacgacaagccgtcataccgattcaatccatccttcgtaccgaaccacataaacccttgcttatcctgcagaatcgtattgactgtattttgggataacccgttctgcacgctcaggtttttgaaataataatgctcgtccgccacttgtgcatgacagcttatctggtagcaaataaaacagaataaaagtgtcagtgcttttttcataacatacgtgttttctatcttcccgtttgagttaccaaatgtaggcaaaataacaacgggaagatgataaatacgtcccaatgaatgaaaaaatagtcttatttctctattctgatacgtgcgtcaactgccacaaccgccttttctgtagccaaaagcgggtttatatccatttctttaatctctgtcgcaaagcggagcaaggtagaaagacggactataatttcagcaaatttatcttcattcacccccttttgtccacgtgtcccctgtatgattttataagccctcagcgaatgaatcattgaataagcctcttcataagaaagcggagccaatccggaagagacatctttcagcacttccacaaagatacctcccaagccgcacaagaccacatgcccgaacttctcctcatacttcgcaccaatgaaaagttccgtacctcgtagcattggctgtaccatgattgctttcgcatcggcaatttgcatcatacggtcaaactccaaagacaaatgttgctcactcttgatattcaacacgaccccgccaacatccgatttatgcacaggtccaacgacttttgccaccactggaaatccgcaacgacgggcaaaagccaccacttcttccttattatccgacacaaattcatctacaagcggaataccggctgcatgaagcaaagcctgtacatgatgaggcgcgatatatccgtcatccggaatagaatcaatgatccgccgaattctcggaacatccactccgaacagttctatttcaggaactgccggtttaggagtattcacaatgcgggaaagagcagtccctaatgtgacctcatccgaaaagttcacgtgacctttagcaaggaacgctgccacttccgctccggctgtattgatggaaggaagtatcgggaaaatcggcttactgcaaacctgcattttctcatgaagcacatcgtacatctcgaacatagtgactagtcccggagttccaaaaatggccatcacagcatctatattctcaaatttctcttcacaatagtcaatacaaagacgcagatgttccggagttcccgtagcaagaatatcaatcggattaccgacagcagctcccggaaagagttgcgctttcagttcttctgccaggttaccttctaacttcggcacattcagcccccccttgctcaacgcatccgtcagcattactccggggcctccggcatgagtgataatcgcaaaattctttcccttcagttcgggcaaggtaaacacacaaccgacagtagtcagctcctcacgtgagaaacaacgtacaattcccgctttacgaaacaaagcctcaacagcagaatccgagctggcaatagctcccgtatgcgaagaagccgcacggcttccactttccgagcttcccgccttaatcgctgcaatcttacacccttttcttatcaatgaagaagcatggaataataatcggtccggattttggatactttcaatatagagcaatttgattcgtgaatctttttcagaatcgaagttctcatccataaactgtaatacatcctccaccccaatctgtttggcgtttcctaccgaccatacagagttgaactgcaatcccttagtcaccgcgctttccaaaatgaatacggctgtagcacccgaactggagataagatccactcctttcggacttaaatttggaattggttgactgaacacactatggtgccaagtattcatcaatccgatgcagttaggtcctatcaacgacgcgccatatttgtttacagtttccagaatacgttcttccaacaatgccccctcatgagtctcctcaccaaagccggcagaaagtatgataaaagcccgggtatgcttccgaccagccaatgtttctacaatgccaggacacattgaagcaggaactgccaataccgcaaggtccgtatcaggcacgtcctgcacatccgcaaaggcaggaactccctgcacttctttctcttttgggttcacagcccgaagttctccctgataacccccgtttatcaggttctttaatattgcgccacccggcttatgtacattatttgaagcccctactacaacaatgctctcagggcgcagcaactgggttgttatcatatcatactctaattttcgtttaacttgaatacaaatatattctttcttacgagaaaaaagaaagaaaagtcactatctttgcacattacaaagctgaaaacaataaaatcacacgatacaatggaaaagaaattcaaaagaaccaccgtcacatcggcattgccctatgcgaacggacctgtccacatcggtcatctggccggtgtatacgtacccgcagatatttatgtacgctatctgcgcctgaaaaaagaagatgtattattcatcggcggttcggacgaacacggagtgcctatcacgatccgtgccaaaaaggaaggaatcaccccgcaggatgtagtagaccgttaccattccttaattaaaaagtcatttgaggaattcggaatctcattcgatgtgtatagccgcaccagttcaccgacccatcaccaactagcttcggacttcttcaaaacattgtacgacaaaggagaatttatcgaaaaaacgtctgagcaatactacgatgaagaagctaaaacattcctcgccgaccgttatatcaccggagaatgtcctcactgccactcggaaggagcatacggtgaccaatgtgagaaatgcggtacttcactctctccgacagatctcattaatccgaaaagcgccatcagcgggagcaagccggtaatgaaagaaaccaagcattggtatcttcccctcgacaaacatgaggcatggctgcgcaaatggattctggaagatcataaagaatggcgtcccaacgtatacggtcaatgcaaaagctggctcgacatgggcttgcagccacgtgccgtaagccgcgacctcgattggggaatccccgttcccgtagaaggagcagaaggaaaagttttgtacgtatggtttgacgcgcctatcggatacatttccaataccaaagaactgcttcccgatagttgggaaacatggtggaaggatcctgaaacccgtttgattcacttcatcggcaaggacaacatcgtattccattgcatcgtattccctgcaatgctgaaagctgaaggcagttacattctgccggacaacgtgccgagcaacgaattcctaaacctggaaggagataaaatttccacttcccgcaattgggctgtatggctgcacgaatacctggccgattttcccggaaagcaagacgtactccgctatgtactgactgccaatgcaccggaaacaaaagacaatgacttcacctggaaagacttccaggcacgcaacaataacgaactggtcgctgtatatggcaactttgtgaatcgtgctatggtacttacccaaaagtactttgacggaaaagtacctgcacagggcgaattgactgactatgacaaggaaactctgaaagaattcgcagacgtaaaagcagaagtagaaaaactgctcgacattttcaaattccgcgatgcacagaaagaagccatgaatctggcacgtatcggtaacaaatatctggccgacacagaaccgtggaaattggccaaaacagatatggagcgtgtaggcactatcttaaacatttccctacagctggttgccaacctcgccatcgcttttgatccgttcctgccgttcagttcggagaaactccgtaagatgctgaatatggacacattcgaatgggctgaactaggaaaagacaatctgctgcccgtaggccatcagttgaataagccggaactgctgtttgaaaagatcgaagacgctactatcgaagcacaagtacagaagttgcttgatactaaaaaagcaaacgaagaagcaaactacaaagccaatccgattcgtccgaacatcgaattcgatgatttcacgaaattggatatccgtgtaggtactatcctcgaatgccagaaagtaccaaaggcagataagttgttgcaattcaaaatcgatgacggactggaaacacgtactatcgtatcgggcattgccaaacactatcaaccggaagaactggcaggcaaacaggtttgcttcatcgccaatcttgccccgcgcaaactgaaaggtatcgtcagcgaaggaatgattctgagcgccgaaaataatgatggcagtttggctgttattatgccgggacgggaggtaaagccgggcagcgaagtaaaataaaaaaatgggtgaagagcaatcactgagacaaaagacagccaaaggattattttggggaggactcagcaacagcttacagcagttgctggggcttcttttcggaattgttctggctcgtttgttgtcacgctccgattatggcatgatcggtatgctgaccatcttttcaacgatagccaacatcctacaggaaagcggtttcatctccgctttggtcaaccgtaaaaatgcttcggacaaagattacaatgccgtattctggtttagtgtttcttgtagcgccatcttatatatattgctctacctgtcggctccactgattgccgagttttaccgtacgccggaattagtccccctttcccgactgactttcctaagtttttttatcgctagtttagggatcgctccacgcgccatccttttccgcaacctcaaagtgaaagaaaatacgattatttccctttcctcacttacattatccggtattacagcaatagtccttgccgtaaatggatttgcctattggggcatagccatacaatcacttgtatacgtagcagttgtcgttatactcaattggtacttcgccaaatggatgcctagcttccatttcgacttttctcctataaaagagatgttcggttttagtagtaaaatgttaattaccaacatattcatgactatcaacaacaatctgttctccgtactattagggaaattctataccaagcaggcagtaggagatttcagccaagcaaacaaatggaataacatgggacattccttaatcacaggaatgattaacggagtagcccagcccgtattagcaagcataacggaagacacccagcgtcaggtagccgtattccgtaaaatgctgcgcttcaccgcatttatctctttccctaccatgttcggcctcagcattgtatccaaagagttcatcgtgattaccattactgacaaatggctcgtttccgcccaaatgatgcagttgctctgtatctggggtgcgtttatccctattaataacctgttctcaaacctgttggtcagccggggacgttcttccgtgtttatgttctgcaatatcacactcagcattttgcaacttatcacagcatgtctcagctatccttatggtatcacaatgatgatttatctgttcattaccatcaatatcttatggttttttgtctggtatttcttcgtcaaaagagaaatacctttgactctatcctgtgtactcaaggatatcgttccttatttcttattagcagccacattgactgcctccgcttattatatcactctcggaatccggaatctatatttatccttactaataaaaatagtgctggtagtatctttgtacgctctgattttatggaaattacaatccgtgatattccgtgagtgtattgaatttataagaaagaaaatctaaacacgaagtatttgcaggggaatatctcctaattgggcagccagttccgaaaaagaactgcctgaagatccataaatcttttgagtgcgtgacagtgtatacatatcggctacagcatccttaattccggaaatcgagccacgatcagaaaccgtctcagccgtatgcaccctgctaccataacgattgcgtaactgctgtttcacctcttccgaatcagttgccagatagatacacaaatcatcatacatatcactttctttgtccaactgtgtaaaaaacaaatccaatggactttgacggatggctaccgtatgatctgcacgacgaatatgtacacctaccgtatgcttggaaaagtgacaaaaacggcgttcgacttcctcacaaacggaagcgacagggtgaaacaaagaacgaagtaaatttgtactgtaattcacaaactggtcacaagtagcaatatacaaccgtccactttgagatgcccactcttccagctccgactccttataacaaagagcacgtacgtccctttcatacagacaatcctcaaacaacaatttctgaaaaagtctcggaagataaaaattacgcctgcgaggacggtcatacataagcaaatgtttgcaagatgtctccgaaaaggatatattcatcaactccggttcctcaaacactttgaaaaagggagcattcagtccccaatcacggaaccatagtacttccaactttctccttactctatatgtcaaggtaacggcagaagctacagcgcgcatacgattagctaatcctcccaccggcactaatataatcttttccataatcatatattcatttccaacacaaaagtaaacaagtttattattctttggctatttttgcagacagtatttacacaaattcaaaaatatgaatattaatccgagctcaccggtttccatttcagtcgttatgtgtacctataacggagataaatatcttgaacagcaaatagattctatattgtgccagacctatcccatccatgaactgatcatacaagacgattgttctaccgatcgtacagtaacaattattgaagcatatcaaaaacgagacccacgtgtcaaactctatattaacgaggcaccactaggattcaattacaatttttcatccgccttcgccaaagctgaaggtgaatatatcgcctcttccgaccaagatgatatctggcgaccggataagatagagattctgatgaaccacgcaacaaatcattctctactttttcataactcttacctattcaccacggatattcaacagaccatggggaaaaaaaacaaatctaatgtactttacaacgagctttatctattaatgaaaccatatgtcccgggacacgaatgtttcttccaccgcaatatcctacccattttccagcaagctgtgaaacaagagaataacatctcctatgactccttgctaatgctggctgccgttgtctccggaccaatagagttcattgacgaaggactggtctattggcgtagacatcctcaagccacttcctaccatacggaacaaaaatacaatgcatgggaaggactacaaactgctctgaaaagcctaagcaaccactcacagcgcaatgttacaaaaagatattttcaagttgtcagcagctatccattcaggcagaaatataccatccgaacaattcggtatatgaagacaggcagtattgttggaattctgaaagcctgttgcgtctgttgcattcagcataaacaactttatccccatacacgttttttgcaatcatgcatcaagtcttttttcactcccttgtattttatccgagattgtagtaaatttgccatccattaatgacttaggaatatgataacatttactgtatttccgcgtttaaggcaaaaccctaacgaaaaaaacaatccctatatagagaatttcatcgcttccttgaaccgtgaaggagaaagtactgttatcaatcctccacaccgaaacccgcttcttagcatattgcctcccaaacgatggggagacgtgattatcttcaattggtttgaaagtattcctgatttcaaatacggacttttacaaactgtcacggcaatctgtttcgtaacagtactcaaattggcaaagaagaaaatcgtatgggtactgcacaacaaaaaaccacacaatgacgggtatacaggcatgaaaaaattcctcatgcgtttcatcgtccggaaagcggatttaatacttacacacgctaccgaagggctggaaatcatccggcagagatatccgcaagccagcggaaaagttcattttctgcaccatcctaccatcaatcgacttccccgacagttacctgccgagaataatattctttatgatttgctgatatggggtactatctcacgctataaaggtatacatgaatatctttcatacctacgtaaccatccggagcaacaccccaatgtctgcattatcggacgatgtgcctccgcctctttgttgaaagaattgcaggacaaagcacctgattatgtcaaaatcatccctgaaagtccatcgtttgaaaagctaagtaattacgtagcctgctcccgttttgtactcattccttactgtcccgattctgtattaagttcgggagtattaatggattccctttctttcggggcaaaggtaataggaccagccaccggatcattcatcgattacagccacaacagtctattaaacgtccacacatttaaaagcctagatgatattgccgtcatcctctcagactataaaaaagaaaaagcctcactagttggatataggcaatttctcgatgaaaacgcttggcagtacttcggcagcaaaattattgaactagtaacaaaaaccaaataacataatgacaaaatacgctcccatattgctgttcgtgtacaatcgtccggaacatttaaaacaaacgatggagacacttcaaaacaacacactcgctgccgaaagtaagctctacatctattccgatgcagcccgcaaggacacagacgaggcagctgtagctgaagtccgcaactatatccataagataacaggatttaagagcatcaccctcatcgaacgggaaaagaactggggacttgcgcgtaatatcattgacggagttaccacacaagtcaaccgcttcgggcgggttatcgtaatggaagacgacttgattacagcaccttacttcctacaatttatgaacgatgcacttgagacttacaaagacgagccacgcgtcggtcacatacaagcttgtgatttcaccaacgacccttccctacccgatacatttcttatcaagtttaccggaagttgggggtgggctacttgggacagagcatggaaatatttcaatcccgacgggaaagagctgctccgccaattggaagaacgtaacctcacacggagatttgacctcaacgggaattatcctttcacgcgaatgctgaggcgccaaatcgagggaaaaaacaattcatgggccatccgctggaatgccagcctgtttttagcagatatcctctcgttaaacaccggacgttcacttattcagaacatcggtttcgatggaagcggcaccaactgcggtggtggaggtttatacagttccaccttatggatgaaaccgctcccaatagaaaaatggtcgccaatagaagaaaatgaaaaagccagagaagcattcgcacgctattaccaccgcacaaattgctttatggccaaagcgattcgacgaattaaacgtaccttgaaaggagacttcggcgcatgaaaatatactattatcacacacgccccatacaagaagcattggacgaatggaagaaccatttacaccccggacatatattatatgggctcactcatttcagtaaacacggtattcacccgatactccaccattaccgtcatttcgcatcccgtatacggttctcactctacaatttctttgaaatcatacgttgcaaagaaccgtatgaccttttgtatggtacctccttttacggactagagcttattatcttcttacgtgcgttcggattgtaccgcaaacccattgctatctggcaccatcaagccgtagtccgaaactccaacaaactgaagaatttgatttcccgcttttattatagaggtatcgatcaaatgttctttttcagtcagacgttaattgaggactctttaaaatcaggcaaagtcaacgccggtcagttgcaccttatacattggggagccgaccttgatttctatgactatctgagacagcaccttccaaccgcaaacgaagaagaaccggaaaagacgtttatcactactgggaaagagaatcgtgacttcaccaccttgctaaaagcatttgccgaaacagggcttccccttgatgtgtttaccacacctgccgccggagacaagaactatgagcttttactaaaaaaatatataccatataccaacatacggatacatttcacgggcggtatcatcccacacaagctcgccacagaagtagcacattcaaaagtagtagtcatctgctgccttgacaacccctacaccgtgggactcaccacactggtagaagcttttgcattaggactcccggtgatttgctcacgtaatcctaaatttcaaatggacattgaaaaagaaagagcaggtatctatgtagactattaatgatacggaaggatggaaacaagccatccgttacctctacacccatcctgaagaagcacagcaaatgggagccaacggtcggaaactggcagaacgggaatataatttagaacattacagccgcgaattatcgcaaatcttaactactacggtaaaaacttatcgcaagcaaccatagatttgcaacgaaaagcgtacatttgcataaacttttatgcgcatgagagtactaatcatcaatacttcagaacgaatgggcggtgcggctatcgcagcaaaccgtctgatggaatcgctcaacggtgccggaatagacaccgggatgttggtactgcacaaaacgagccactccgataaagtacataccgtcggtaagtcttggcaaagaaagttcacgtttatctgggaacgtctcattatttgggcaaataatcttttcagccggaagaatctttttaggatatccattgccaatacggggttcgatgtcacccggcttccggttttcaaagaggcagatatcattcacttgcattgggtcaatcagggcatgctgtccttgcacaatattcaacaagtcatcacctccggcaaacctgttgtttggacgatgcatgacatgtgggaatgtacctccatctgccattattcctactcttgcgaatcattcaaaaacgaatgcggaaactgccactttctccgttttcccgggaacaacgacttgtctcaccgcgtcttcaagaaaaaacagagcatactctctccggcaagaataaatatcgttacagtaagtaattggctcgcctcacaagtacgccaaagcacactactcaaaggaaagccggtcacagtgataccgaatacgctttcactgagcaacttccggatacttaataaagtagaatgccgacaagcattatctcttcctgacaaacggattatcgtgttcggggctgcccgtattgatgatccgataaaaggattcccaacgttgatggaggccattcgccttttaatccgacgaaaagactttcggagtaaagagttgcacctcctactattcggaagaatcaaataccccctgcaggtgctcccgtctattccggtcagtcatacctacatgggctgggtaagccaagcggaggagctttctcaaatctattcggcagccgatgtcgcagtgtccgcctcgctctacgaaaccttcggacaaacactgattgaagcccagtcttgcggttgcctgcctgtttcgttcggcaacagcggacaagcagacatcatccgccataaggagaatggatacttagctgactatcagtcggcggaaagtctggccgacggaataaaatggggacttaccgaagggaaagaacgagtgtcaccggaagcaatgagaaacgaagtaatgactaaatattcgggcaaggtggtagccggacaatatatcaatctgtatacaagcctgttggcaagcaaactttagaaaatgagaatactgattattaatacttctgagaagatgggcggtccggccgttgcggcaagccgtctgatggaatcgctgaaaaacaacggtatcaaagctaaaatgttggtacgtgacaaacagaccgaccagattagtgttgtcgggttgaacagaagctggttgcaagtatggaaattcatgtgggaacgtcttgtcatctggagtgccaaccgttttcaccggaatcatatgtttgatgtagatatagcgaataccggcacggacattacgtcacttccggagttccgtcaggcggatgtcatccaccttcactgggtcaatcagggaatgctctcattgaaagatatccgaaagatattgtcatccggcaagcctgtagtatggacaatgcatgatatgtggccttgtaccggtatctgccactatgcacgggaatgtaccaaataccagaaggaatgccatcactgcccctatatatataaggaaggaggccggaaggatctgtcatatcgcactttccgcaacaaacaagaactttatgctcatgccccgattcatttcgtcacttgcagtcattggctgaaagaacaagcacaaagtagtgcattgcttgcaggaaaagagattgtcaatattccgaacgccattaacacgaatctcttcaaaccacaaaagaaggaggaggcacgtacgaaatgtatgttgccgcaaaacaaaaaactaattctgttcggttcggtaaagattaccgataagcggaaaggagtcgaatatttaattgagtcctgcaaaatgctggcagaaaagcatccggaatggaaagattcattggaggtagttgcattcggcaaccaatcccaacagttacaggctctgcttccctttcgtgtacactcacttccttacatcaagaatgagcatgaattagtgaatatatacaactcagtagatattttcgccatcccgtcgctggaagagaatctgcccaacatgattatggaagcgatggcatgcggagtgccgtgcgtagggttcaatgtaggcggcattcccgaaatgatagaccatctgcacaatggctacgtggcacaatacaagtcttcggaagattttgccaacggcattcactggatattgacagaaccggaatacagcgaactctcagaacaagcccgccgcaaagtattgggcaactattcggagagtatcgttgccaaaagatatacggatatctataacaaaataacaggaaaatatgcatagcgtccatcccactccgaaattctcaatcatcacggtaacatacaacgctgagaaggtattggaggacaccattctaagtgtcatctcacaaacctatcatcacgtcgaatatattatcgtagacgggggatctgaagataagaccttatccatcatcgaccggtaccgttcgcggatacacactgtcgtcagcgagccggacaaaggattatatgacgccatgaataaaggaatctctcttgccaccggtgattacctttgctttctgaacgcaggcgactgcttccacgaagataatacattacagcaaatggtacataccatcatcggcaacgaacttcccgatgtgctttatggagaaaccgccatcgtagacaagaacggtcatttcctacgtatgcgcaggctatccgctccggaaactttaacgtggaaaagctttaaacaagggatgttggtctgccatcaggcattcttcccccgccacacgttggtagagccgtatgatttgcagtaccgcttctccgctgacttcgactggtgcatccgcatcatgaagaaagcgcatacccttcacaacactcacctgacaatcattgactatttagacgagggcatgaccacccggaaccggaaagcatccctcaaagagagattccgcattatggcagagcattatggatggatcagtaccacgatacatcatgtatggttcgtgatccgtgcagttactcaccaataggcgaaggcatataaagcattacctggtctaatatcactccttcgtccaatgccttgattaccaatttgtgggacttctttccagatatcggaagtcgaactgttcgaatggcttgattgcgcagcacgttctctttccattcttcactccgtcctttcgtttcataagagatcacttcaggctctgcatcgtctaacgatattgagaaacgtagttgatctcctcccacaggatgattaggcaataagcggatgtcaacctctaccgagtctgttttcctgttgtcaaaagagaacatcagtgcatctcccttgtcaatgcctgtcgctttgctttcatatcccagaccctcacaaatagcagaagttcctttccgttcattcaatgtattcttaccattcgggatatttttcccatccaatccgttccatttatagatagctacacgctctttcatcatcggagaagtagccgtttttctttccacgcgattgaatacggggagttttcggggttgaaaatccatcatgcggttccactttccatcttccagtgagttatactgcttcgtcaatactacaatgctgtcataggctagatcacttttctcccagtccgcttttccgtggcgggctaattgggcatatagcaatttccggttcatctgtgtagcagcttgcaccgggtatttcaccaattcaaaataggcactttgtctaccggatgggattttcgaagctgcccgttccactgcctccgacaatttatcataagcctgcaaacgtccgttgatttctttttcactccatggaagatctttgacaacacgataaacaggatctttctcctcttccctcgtatttcccataaattcaggtttacgaatatgggccagacgatagtgttcctgcatcacaggtaatactgcctttgcgcacaaagctcccaattcccgttccagccagtgtttcagatgagaggtcactccttccgaggccacagcttctatattccaggccatatctataaacaactctatctgatactcggcaggcttgatatctccgacattcagtatccacatcttctgtatgcctcgatcgtaagccaacttcatttgttggaaaatcagatacgggctcatcgtactcaaccagagatggtcgtgcggacgtccccaataagaaacatgataatagactccattccctcctttacgtgcgcattcttcggccgtaggaaaatggcggatatagccatagttatcgtcacaccacatcaatgttacatcatcgggcacctgtaatccggcatgataaatgtcgagtacctctttataagggataaaaacctgcgggactttagttacatccttatcaacatatttttcaatcaacccgcgttgatctgcaaacacacgatctattacggccttctgttcttccaccgtcttcgctccctgcatcttaccatcgtgtacaccacgcatacccaacgtatagagtatttcctgatctgccacctcttttacacggtcttcccagaatttgtaaacagccggagcattattcacataatcataagccccttcccctcttcgtttccactcgccggcagcgctgcaagccatcggttcgcaatgggaagcaccgatgaagattccatatttcttggcagcttcccgattgcctttggtcaggaagaaaggaagtgtacattcgtgcattgcaggccaataggtgttggcacgcagacgaagtaagagttcaaaaatacgctcgttggtacgcgggcctatctcacctttcacttttgaaggttcataggtccgactgctccatggcatcaagccccagtcttcatcattaataaatataccccgatattccaccgaaggagcctgaagactttggaatttagaagatagcttaaaaagtttcttcttttccggagttacgtccgcccaccattcccagggagagacacctaacaaacgggatatttcgagtattccataagccgtaccatgtttgtcactgccgactacgatcaatttaccctccggagaaacagataatagaaaagcctgcttcttgccttttagcgcagaaacatctatgccggtccggctgataagctcactctgccccaccgttcctatcacaatttcacctgttttctcattcgcttgggtagtcgacgacaatactgtctgaatatcacgccccagcatttccaatgcggttcgtacaaccagttcttcagaagggctgcaagcgatgacaactgtttgaccggaagtcaaaacaaaatccttactacgaatcggtaaagcaactatcaaaaagatgaaaaaaggaaacagaagtttatgtctcataggttctattatttatagaagacaaaattacaggtttgcagaaaatgtactatagaatagtgtacaatttcatagaattctgtccgacctattctcaaactcccaataactgtttcaattcagccactccttcagaagcccccttctgaatcacatgtatcggacgggaagtatgcgtatctaccggtttcggatcaatcagatacacctctgctcctcccggtacataatgaagcaaccccgctgcaggatatacattaagcgacgtaccgataataacgaaaatatccgccttctccacatattggatggctgtctcaatttccggcacagcttctccaaaccatacgataaaaggtcgcaattgagtgccgtcgtcggccttgtctcccatcttcacttcatattcttccggtttcagctcttttatgtaatgaggattatgaggatctctactggaacacactttcgtcagttcgccatgcagatgaacgatacggctgctcccggcacgttcatgcaagttatcgatattctgtgtcaccaccgttacatgaaagtttttctccagttccgccaacaattcatgtccacggttcggctttacctccaacaactgtttccggcgctcattatagaaattaatcactaaagccgggtcacgctgataaccttcaggtgtagccacctgctccacaggatatttatcccacaaaccgcctgcatcgcgaaatgtactaatcccactctcggcactcatacccgcacccgtcaaaactaccagattcttcattactattcctccttcttttttaatagccacacaaatgtaatcagaatcatcgaataaaagaactaattcttttgtaaaaaaacggctaactttcacagatataagaatttttaaataccaaatgctaaatcattcaaataaaacacgtacttttgcgattcataaatttgcaattgattgaaggctaaaactatgaaatacgcttcaatcgccaacaaaaaacattatatggataaattcagttactctattggtctcggaatcggccaaaacttatcaagtatgggaatcgccaacctttcggtagacgacttcgcacaagctatcaaagatgtattggaaggcaaccagacggctatcagccatcaggaagcccgcgaaatagtaaacaagtatttcgaagaactggaagctaaaatgggcgccgccgctatcgaacaggggaaagcattccttgaggaaaacaaaaaaagagcaggtgtagtaactctgcccagcggattgcaatacgaaataataaaagaaggtacaggcaaaaagcctcaggctaccgatcaggtaaaatgccattacgaaggtactttgattgacggaacactgttcgacagttctgttcagcgtggtgagcccacagtattcggcgtgaaccaggtaatcccgggatgggttgaagcacttcaactgatgccggaaggttctaaatggaaactgtatattccgtctgaactgggttatggcgcaagaggtgccggagaaatgattcctccccacagcacactcgtatttgaagtagaattactcgaagtattataaataaaaaaattcaaagcaaaatgaaaaaagttagtatttttatggcaatcgccgctgctgcaagccttgcttcttgcacagctcagtctcctaaagcaaatctgtcaacagaactcgactccctgtcttattctatcggtatggctcagactcaaggtttgaaaggctacctgacaggccgcttggatgttgatactgcttacatggcagatttcatcaaaggtttgaacgaaggtgcaaacaaaaccagcaagaaagatatcgcttacatggcaggtttgcaaatcggtcaacagatcagcaaccaaatgatgaaaggtatcaaccaggagttatttgccggcgactctactaaaacaatcagcaaagctaacttcatggcaggtttcatcgcaggtactttggaaaaaggcggcatgatgactatggaagaagctcagacttatacccgtacagctatggaaacaatcaaagcaaaagctttggctgaaaaatacgctgactacaaagctgaaaacgaaaagttccttgccgacaataaaactaaagaaggtgtgaaaacaactccgagcggtctgcaatacaaagtgatcactgaaggtaaaggtgaaatccctgctgacacttgcaaagtgaaagttaactacaaaggtactttaattgacggaacagaatttgacagctcttacaaacgtaaagaaccggctactttccgtgctaaccaagtaatcaaaggttggacagaagcattgactatgatgcctgtcggttctaaatgggaactttacatccctcaggaactggcatacggtgctagagaatcaggcggccaaatcaaaccgttctctactttgattttcgaagttgagctggtgggcattgaaaaagataagaaataagaaagtttctttctaaatagaaaaaggaaagaggtgcaaagcgtttgcatctcttttttttgcttttgcctattttttctctcaaaaaagaagaataattaaaataaatctctatatttgcttactatttgataacaactggaaattataatttattattatggaaagaatagacaatctcgacaggcagatactagaaattatttcccagaatgcccgtatccctttcaaagacgtagcagccgaatgtggagtgtcacgtgcagccatccatcagcgtgtgcaaagactgattgacttaggtgtcattgtaggctcgggctaccacgttaatcccaaatctttgggctacagaacatgtacatacgtcggtatcaaattagaaaaaggctctatgtacaaagctgttgtggcagaacttcagaagattcccgaaattgtggaatgtcatttcactacaggaccatacactatgctgaccaaattgtacgcatgtgacaacgagcatctgatggatttgctgaataacaaaatgcaagagataccaggtgtagtagccaccgagacattgatttctctggaacagagcatcaagaaagaaatccccattcgcatagaaaaataacaagcgatggagtttctgaatgaatatcaccttgcagggctatttatcggaatttgtacctttttgattatcggcctttttcaccccgttgtggtaaaggccgaatattattggggcactaaatgttggtggatattcctgatactcggtataggcggtgtcatagcgtcattgagcattgacaatgtaattctgtcctccctgctaggcgtattcgctttctcttccttctggaccattaaagaggtctttgaacaggaagaacgggtacggaaaggctggtttcccaagaatccgaaacgcaaatacaagttttgaaggcaaagaatagcagatttttatcaaaagaatttgcataattcgacagaaagcactacttttgtgaccgcatccagtaaatggatacaccggacttgtagctcagttggttagagcaacagactcataatctggaggtccctggttcaagcccaggctggtccacaaactaagaggctcattcctaagggaatagagcctcttttagtttgtagaacctcacagatatcacccgtcctttccaattggaagcaggacaagagatagagataagtgtggaatatagtcaaaatgctcctccgggcagtgtacaattagtatggtcacttcccaactcggcgagcatctcaccacagcatttgcttgacagggtgaaaaaagacggaactacactaatactcctcaaatcagccgagtcgtggatggatgccatagcacaggctagcggatgtgtctataaaggattttactcggtaggacgcaattggataggtggcattcacttcgtaaaagaacatcccctgtttaatggactgcccaccaacacagctatgggccttaccaagcattggtgcacgagggagataagaaattagggttctatttggaaagtgatgaaatgattgtaggctcctatcgtactccccccccctttgcctaggttctactttgggaatcattccttatggtaaagggagaataatctactctacacttgatgttgtagacaacttactgtcacaagaaccggcagccgaagtggctagaaaacttttttgcaatatgctttctattagtaactggtaaagtaatctgcaaactaaaagatgggtagcctgctcagactacccatctataaattattaatgtaagctgaaaacaatcttcacctatttagcggaaatctttcaattcttcctgtaacctctgacgagtaaagaaaatacggctttttactgttcccaaaggaagatctagtttttcagcaatctcacgatacttaaatccggatacgtgcatagcaaacggaactctatattcttttggaagggcattaaccacacggcgcatctcttttaaatcataagcgctctccgtactttcaaatcctgaatcttgtggcaggtttatatggtagaggttatcagtctgatcgacgaacgtttggtctcgtaccactttacgatagttattaataaagatgttgcgcattatagtgtacatccatcctttgaagtttgtatcgggggtatatttatcttcgttatccaaggcttttaatgaagtttcctgcaacaaatcgtttgcttcttcgcgatcggttgttaatttataagcgaaacggagcaattcttcctgtactcctaccaggtctttctcgaagcttaaacttttcatatgcgttacttttaatttgtgaatacttgtttcaattcgatgatgcaagtttacgagaattcgatggaagcaatgaaccgagaataaacattttttaggggaaaatctatccgccgactatttttaggtcatttctgatagtttttgggtggtgttccggtatgccacacaacaaaaaatcccattttgaagtcacacttgactcaaaatgggataacacaaacaaacaatattagcgattttcacaaacagctgtcttttttatattctaaaattcataagactgatttagattatgttattagaacatttttattatggatacaaatgtattactttatcagcacattacaggtaggaaggagaaatagttataaaaaaaaatccatccacatataaagaataatacatatacacaaataattatatacaaggtaggactatcacctgagaatgaatatctaaaaatcgcccatttcatcggaagaaaacgggaataaattatattttagatatagcctcatttgcaagctaaaagcaaaaagagtatctttggcatacaaaataaaaagtataatgatgatgctgaaatgctatctgcctattctctacctactactaacatggtgcccgtacatttccggagtacccccaagaacccctcaacctaaaaaaagtccgatggctctatacatggattctctaggattgataaacgttactgagctagacaatagtcttgctgtacagctaatgtacacacaggatgataacttcaccggggaagtcctttacgataatctgacagaagcttatttgcacccggacgccgcatatgctctcgtgaaggcacaaagagctttaaaggaattacacccgtcttatagcctcatcatttacgatgccgcccgtccaatgtctgtacagaaaaaaatgtggaatgtagtgaaaggaacctccaaatacaaatacgtctccaatccgaatcggggtggtggactacataattatggcttagccgtggatatcagtattctggattcatttggacaaccattgcctatgggaacgaaagtagaccatctgggtgtagaagcccatatcacacaggaaaacgagctggtacgcaatggaaaaataagcgagacggaacatcagaaccggttactgctacggacagtaatgaaaaaagccggatttcgtgcactccccagtgaatggtggcatttcaattattgcagccgggatgtagctaaacagaaatataaattaattccatgaccggcaccccatcattaatcacattatcgtatcatataaccatatctttatgtatatctcctctgaaacccgactttttatccgcgaacattcaacagacgatgtacgtactcttgctttacaaagcaaaaaatatccggatgtagatatgccggttgctatcactcagattgcaggacggcaaatcgccgcagaaaagattccatcgtggaaaaagatagaagatataagatatcccaagcacctgtccttagaacaatgttcttcggagatcaccgcctattacaaagccggtctcctgcaaggagattccttaactgatctgaccggaggattcggggtagattgttcatttcttgccgaaaaattcaaatccgtcacttatgtagaacgacaagaagaattgtgcggtatagccgcacacaacttccccatattgggcctaaaccacattaatgtaaagaacgaagacggaatagctcacttgaaagcaatgtctccggtagactgtatctttctcgatcccgcccgccgcaatgagcacggaggtaaagctgtcgctatctccgactgcgagcccgacgtagccgcactcgaaggactcttactaaataaggccaagcaagtaatggtaaagctctcccctatgctcgacctttcattggcactacgagaactgcaacagacacaggaagtccatattatatccgtcaataacgaatgtaaggagttactgctgattctcggtcagacaataccgcaagaaatcaaaatccattgtgtcaacctctccaccaaaggagagcaagaagaacaacactttacattcacccgtgaacaggagcaatgcagccaatgcaactacacagattctttagatgaatatctgtatgagcctaatgcctcccttctgaaagccggagctttcaaaagcctgtcatccgcttttcctataaggaaattacaccccaacagtcatctttacacctccgacaccttgattgataactttcccggaagaatattccggattgtcaatcaatgcagcttcaataaaaaagaaagcaaagaatgtctggccgacctcaagaaagcaaacatcaccatccgcaacttcccggctacggtagccgaactccgtaaacggatcaagctatcggaaggaggagatacttatctatttgccagcacattaaacaacgaacagaaagtcctgatccgctgcgagaaaatcaagtagacatctcacatgccgtaatataaacgtaacatatttgttatgcgttcttcaaccaactgtaaaaagcaagaaacgtcacccctctacttttgcagcaaataattaacgcacgctaacatttatgaaacgatttatcagattactctcattagttcttttaattatgagtacaagcggtaacactcttgcagaagaaaaagtgaacgtagtcaaacaaggtactatccgcggacgtattgtggatacttccaaacagattctgccgggagcctccatctatattgaaaaattacacaccggagtaacaagtgatatcaacggttactacacatttgccaatcttactcccggcacatacaccgtaaaagtaagttatgtaggttactctcctgtcgaaatgaagataaccattcctgccggaaagacactcgaaaaagatgtagtgctcaacgaaggattggaactgcaggaaatagtggtaggcggtgctttccaaggacaacgccgtgccatcaatgcacagaaaaacaatctgggaatcactaatgtcgtttcagccgaccaagtcggtaaattccccgactctaatatcggagatgcattgaaacgtatcaatggtatcaacgtacaatatgaccaaggagaagcccgcttcggacaagtacgcggaacttccgccgaccttagttccgtaaccatcaacggcaaccgccttccttccgctgaaggtgatacgcgaaacgttcagctcgacctgattcccgccgatatgatacagaccattgaagtgaataaagtagttacttccgatatggacggagacgctatcggaggctccatcaatctcgtcacgaaaagcactccgtacaaacgtactttcagtgctactgccggaaccggatacaactgggtcagtgaaaaagcccaattgaatctggggcttacctacggtgatcgattcttcaataataaattaggagtaatggccgctatctcctaccaaaacgctccggtaggatcggacgatgtggagttcgaatatgatgtcaacaagaaaggagaagtagtcatggtagaagcacaaaaacgccaatactacgtaacccgtgaacgccaaagctactcattggccttcgactacgatataaacccgaaccacagactgacattgcaaggtatctataaccgccgtcatgactgggaaaaccgttaccgtgtcacttataaggacctggacaagacaggactggatgacgaaggtgaaatgcaacaatccgcacaaatagaaactaaaggaggcacacccaacaataaaaatgcccgtttggaactacagcagactatggatttcagtctgggtggagagcaccaattcggcaaactatctatggattggggagcttcttacgcacgtgccaccgaagatcgtccgaacgaaagatattttaacctgaaacaggactttctcggattcgacgtcgtagatgcaggcgaccgttttccatacgtgacaacagatgtaagcctccacaatggaaaagcagacggtgaaagaggaaaatggaaagtaaaggaactgaccgaaagcaatcaggaaatctatgaaaatgacctgaaattcaaagtcaacttcgaactgcctttaaccaacggtatctacggcaacagtctgaagttcggagccaaatatgtttccaagacaaaagaccgtgacgtaatctgctacaactacgcagatgcatataaagacacctacgatacagaatacatgaacaatcttaccagtcagatccgagacggcttcatgcccggcagccaatacaaagctacggatttcgtctccaaagaatacttaggatcactcaatctggccaatatggaaggcgagcaggttcttgaagagtcttccggcaattaccacgccaaagagaacgtcacttccgctttcttccgtttcgaccaaaatctcggaaagaaaataaagatgatgttaggactccgtatggaagccactcatatcaaatacaacggctggaattggaacgtagatgaaaacgaagatgaaagcctcgaaccgaccggtgagcataaaaacgactatgtcaactggctccccagcgtcttattcaaatacgatgtaaacgacgatttcaaagtacgcgcatcttttacagaaacattaagccgtcccaaatattcggcattgatcccgtgcgtgaatatcaaccgtagcgacaacgagctggtgatgggtaatcctgatttaactccgactatatcctacaacttcgatttaagtgcagattattactttaaaagtgtaggtttggtcagtgcaggcattttctacaagaaaatcaacgatttcattgtagaccaggtaataggagattatacctaccagaataacgaatacaaaaaattcactcagcccaaaaatgcaggtgatgcagatctattaggcgtagaacttgcttaccaacgtgatttcagtttcattgctcccgcactgaaatgtatcggattctacggcacatacacctatacccacactaaagtgaacaactttaacttcgaaggacgtgaaaatgaaaaagacttgtctcttcccggttctccggaacatacagccaacgcctctctctatttcgagaagaaaggattcaacgtacgtctctcttataactacgcctccagttttatcgatgaaatgggagaagttgtcgcactagaccgctattacgatgctgtcaattacatggacttgaacgccagctatacgtttgggaagaaaataaagactacgttctatgcggatgccaccaatttgctgaaccagccgttgcgttattatcaaggcgtcaaagaccgtacaatgcagtcagaacactatggagtgaagattaacgccggagtaaaagtcaacttctgatacgggctgatttgttccttttaaaccaacagcccctcaaaaatcaaaacaattgcatacatttacaaacatctaatatacaacagaatatgaatataaagattaaaggtttattgattctagcattgatttccgtctgtacattcgctcaggcacaattgacggattattctatatttgatcagaagttcaacttctatatagcgaacgacttgggacgtaacggatactatgaccaaaaaccgattgccgaactgatgggtacgatgggagaagaggtcggtcccgaattcgtcctggctaccggggatatccatcatttcgaaggagtgcgcagcgtgaacgaccccttatggatgaccaactacgaacttatctattctcatccggaattgatgattgattggtttccgattttgggaaatcacgaatatcgcggtaacacacaagctgtattggactacaccaatattagccgccgttggacaatgcccgaccgttactacacaaagagattcgaagaagaaggtacaaccatccgtatcatttggattgacacgactcctctgatcgacaaataccgcaaagagaatgataaataccccgatgcctgcaaacaggatatcaacaaacaactggcatggctggattctgtgctggctaatgccaaagaagactggattatcgtagccggacaccatcctatctacgcatacaccccgaaagaagaaagcgaacggatggacatgcagaaacgtatagaccctctcttgcgcaaatataaagtagatatgtatatctgcggacatatccacaacttccagcatatccgcgttccggaaagtgacatcgactatattgtcaattcctctgcatcactggcacgcaaagtaaagcccatcgaaggaacaaaattctgtagtcctgaaccgggtttctccatctgctctatcaacaagaaagaacttaatctacgcatgatagacaagaaaggaaatgtgctttatacaatcacccgaaagaaataagttctcttaaaaagataaattctactctcagaaaaaacacacgacatagggtgtccctttcgtgatgaaagggacactctaactatatatatctatcggtcacagtcatttcggcttactttcttgggcagtcttatctgtaggacttgtatttctcaaatcatctttcggaatcgtcgtctcattaccatcccgcatagccatataatgcggtgacatgatttcaatacccgcctcattaaatttatcctgaatattctgatgcaggtttgaataaatctgaggcattttatcagcttccttgatataagcattcacctgatataccggataccagtcacttaaagaagtttccagaacaaacggacgcgggtcgtccactacaccgggagtattcaatgccgcatcaatcaacaattcatttactttccgccaagggatatcataaccaatggacacctcagaatgaataatcagcccgtattcacgtgctgacgtgctataattcacggtatgagacgacatgacgaaagagttgggtacagtgaccacctcattcttaggcgtacggatacgggtaacaagcggagttttctcaataatgttccctgtagtatcattcaactgaatccgatctcctatcttgaacggacgcatataagtaatcaccaatccggcaatgatgttgccgataaccgtactcgaaccgagtgagacaatcaagccgacaaacaccgatattccctgaaacactccggagttggaacccggcaagtagggataaatcatcgcaatcataaaggcatagagcagaaaacggataatatggaacgtcggcattgcccaatccggataaaagccgttgatcttaagacgccctccctctacttcacgtgccagatacaacacgaaacgcaccagatatttcactgcataccagatcacaataatagtaaacagtttaggaatgtagtcaatgataccgacaaagattccacgaatcggattccagatataaccgagcagacgataagccaacccttccgtctgtgggaaaataataaaaatcagcggtacggtaaacagtaattgtaatcccataaggatataccgccctacactggctagaaagactaacagattcgcctgcttctgtgcgtccaacaattcatatccctgaatcgacaccggttttatcttcgtatctttcaagcgtagaatgcgtactttcaacttacggaacagccaattggtaagacggaacaaaaaatactggcctacaatcaccaatacaaaatagagaatacgttttgccattcgccaaatcccgtgttccgccttcatctcgtgcagtttgtcaacaacgttctgccgtctctcattcgccagagaatcgcgggaaacgccctcccataaagcgtcctgatccgtaagggacagcaacaccttattgccatacatcaaatcggaaacaatatccgaatggtctacagaaaccgaatcgggacgaagattgaagcgccttcccaattcttcaatggcgctaccggtcatttgcgccctttgttgaggagtatacccaccccgttttgtataaagataaaataaagtgtcgccatccgccactacaggaatacctttggtaaactgacgcaaagaatcgatgcgttgtcgttgccgggcatacttcactgaatcggctgcggccatctgaagcttcatctgctccatctccatccgcatattcgcctcattaagccgggcagtctccaatgtcttttgcaaatttgccacataagcagagtccgatccctgtttcatagaagcatgtacaccggttatactatcccccgcaaatatctttttgacagcctgctccaactgcgcctgtgccccaattgttgcaaaagacatcaacaatatcagcaccaaccgctttattttatttatttccatattctactattcaaatgattacaaattaaggttaatccacttcttttttactaaaacagagcaaacatacggattgtttttgacattacaattcctaaattgattatctttgcaattcaaacagaaaaagctatgaatatattatttcttataggaggacttatcctcattcttctaggtgccaacggattaacagacggttctgcctcagtagccaaacgctttcgcattccgcctatcgttatcgggcttactattgtcgcattcggaacttctgccccagaactgacggtcagcgtttcttccgctctcaaaggcagtgcggacatcgctatcggtaatgtagtgggaagcaatattttcaatacattgatgatcgtaggctgcaccgccctatttgccccgattgtcatcacccgtaatacgctcagaaaagaaataccgctctgcatactctcttcaatcattttactggtttgtgccaacgatgtctttctggacaaggcatcagagaacattctaaatagagtagacggtctgttattgctttgctttttcgccatctttatgggatatacatttgctatcgcttcctctggtccttccaagcctataacggacaatgcgcagccagccgagcactccgccgaagaagaggaaatcaaatcgctcccctggtggaaatccactctatatatcatcggcggtctggctgcacttatatacggaggacagttatttgtcgatggagccactggtattgcccgcagtctgggagtcagtgaatcgattatcggcctgactttggtagcgggaggcacttctctgcccgaacttgccacttccatcgttgccgcattgaagaaaaatccggagattgccatcggtaatgtaataggaagcaatcttttcaatatcttcttcgtattgggatgcagtgcaagtatcaccccgctccatcttagcggaattactaacttcgacttattcacattagtaggttccggtatcctgctctggttcttcgggctattcttcgccaaacgaacgattacacgaatagagggaagtatcatggtggtttgctatatagcttatacattagtattgatttacaatacctaaaccatccgtcaatttttggcagctcatcccctgtacacagtttttgccgtcctgcgcgttgtaatttaaagattatcacgtatctttgcttcctgaatcataaatacgagatatggctattacaatcaagaaagtctctacgaagagagaacttaagaaatttattcgtttcaattacaggatgtataaggataacccctattccgtgcccgacctgtatgacgatatgcttaacacattcaacaagaagaaaaacgcagcgttcgagttctgtgaagccgattacttcctcgcctaccaagacgataagatagtaggtcgtgtagccgctatcatcaacaaccgcgctaacgaaaaatggggttccaagaacgtccgtttcggatggattgatttcatcgacgacccggaagtatcctccgcactgataagaaccgtagaagattgggggaaggaacggggcatgactcacattgtcggacctctcggatttaccgacttcgacgcagaaggtatgctggtggaaggtttcgaccaactcagcacgatggccaccatctacaaccatccctactatccggtacacatggagaaactcggtttcgagaaagatgccgactgggtagaatacaaaatctacataccggagaccatccccgacaaacataagcgtatctccgaactgattcaacgcaaatataacctcaagataaagaaatatacctccggaaagaaaatagccaaagactatggacagaagatattcgaactgatgaacgaagcttatagtcccctctacggatattcacctctgacccaaaagcaaattgatcagtatgtaagaatgtatctgcctattctcgatttgcgcatggtaaccctcatcaccgacgccaacgacgaactggtctgcgtaggaatctccatgccatcccttgccgaagccctgcaaaaatcgcacgggcggttgttgcctttaggatggttctatctgctaaaagcattattcatgaaacgtcgtgccaaaatgcttgatttactactcgttgccgtgaaacccgaatatcagaataaaggtgttaacgctttgttattttccgatttaattccggtttatcaaaaattaggttttatctttgcagaaagcaaccccgaactggaactgaacggaaaagtccaggcacaatgggattactttgatactcaacaacataagcgccgccgtgcgttcattaaagagataaaataaaagctatggaagagaacgaattgatacctgtagacaacaacgatgcagtagagtacactgacgacaacatccgccacttgagcgacatggaacatgtccgcacacgtcccggtatgtatatcggtagactgggcgacggcgcgcacgccgaagacggaatctatgtcctcctgaaagaagtaattgacaacagtattgacgagttcaaaatgcaggccggtaagaaaatcgaaatcattgtcgaggagaatcttcgtgtcagtgttcgcgactacggacgaggcattccgcaaggaaaactgattgaagctgtcagtatgctgaatacaggcggcaaatacgacagcaaggctttcaaaaaaagtgtcggactgaatggagtcggtgtaaaagctgtcaatgccctcagttcccgtttcgaggtacgaagctaccgcgacggcaaggtacgtatcgccactttctccaaaggagagttgctgacggacgagacacagaacaccgaagaggacaacggaacttatatcttcttcgaaccggacaatacattattcctgaattacagcttcaaacccgaatttatcgagacaatgctgcgcaactacacgtatctcaatacgggacttgccatcatttataacggacaccgtattctgtcgcgcaacggtctggtagaccttttgaacgacaacatgacggcaaccggactttacccgatcatccatctgaaaggggaagatatcgaaatcgccttcactcataccggacaatacggagaagaatactactctttcgtcaacggccagcatactactcaaggaggtacgcatcagagtgctttcaaggagcatatcgcccgtaccattaaagagttcttcaacaagaacatggactataccgatatccgcaacggattggttgccgccattgccgtcaatgtggaagaaccgatcttcgagagccagaccaagaccaaactggggtctaccaatatggctcccggtggtatcacggtcaacaagtatgtaggtgatttcatcaaactggaagtcgataacttcctgcacaagaatgcggacatagccgaaacgatacaacaaaagatacaggagtcggaaaaggaacgcaaagccatcgcaggcgtgacgaaacttgcccgcgaacgtgcgaagaaagccaaccttcacaaccgcaagttgcgcgattgccgcattcatctgaacgacccgaaaggaaaaggactggaagaagaatcttgcatctttatcactgagggagactctgcaagcggctccatcaccaaaagccgtgacgtgactacccaagctgtattcagccttcgcggtaaaccgttgaactcgttcggactgaccaagaaggtagtttacgaaaatgaggagttcaaccttcttcaagctgcccttaatatagaggatggtttggacgggttgcgttacaacaaggtaatcgtagcaaccgatgccgatgtggacggtatgcacatccgcctgctgatgattactttcttcctgcaattcttccccgatctcatcaagaaagggcatgtatatatcctgcaaactcctttgttccgcgtacgcaacaagaagaagaccatttattgttattctgacgaagaacgtatcaacgccattgaagagctaagcccgaatccggaaatcacccgattcaaaggtctgggagagatttcaccggacgaattcaagcactttatcggtaaggatatgcgtttggaacaggtaactttgcgcaagacggacgcagtgaaagaactgcttgaattctacatgggtaagaatactatggaacgacaaaactttattatagacaatctggttatagaagaagacttggcatcatgagaaaagcaatatttccgggtacattcgaccccttcaccatcggacattattcggtagtgaaacgtgcacttacctttatggacgaaatcgtgataggaatcggtatcaatgagaacaaaaacacgtacttccccattgaaaaaagggaacagatgatccgggaactttacaaagacgagcctcgtatacaagtaatgtcgtacaactgtctgactattgattttgcacaggaagtaggcgctaagtttatcgttcgtggcattcgtacggtgaaagacttcgaatatgaagagacaattgccgacatcaaccgtaagctggcaggcattgaaaccatcttacttttcactgaacccgaacagacttgtgtcagctccacgattgtacgcgaattattaacttacaacaaagatatcagccagtttattcccgaaggaatggtgataagttgagagttgagaatggagagttgagaatgatgtagacgtatccggcaattatattatataaagtaagattatgaatagaatgaaaatatacgtcctcttagtttgtctggggacaatacttacagtacaagctcagaacttcggttcggctgctatgcgtaagttgcaaatggcagagtttgcaatctccaatttctatgtcgacaaagtagatgaagacaagttggtagaagaagccatcatcaagatgttggcacaactcgatccgcactctacttactcggatgcagaggaagtgaagaaaatgaacgaaccgctccaaggtaacttcgagggtatcggagtacaattccagatgatagaagacaccctgttggtggtacagcctgtcagcaacggaccttccgaaaaagtcggtatccttgccggtgaccgtattattgccgtgaacgacagcgctattgccggggtgaaaatgagtacggaagatatcatgaagcgtcttcgtggcccgaaaggttcgaaagtcaatctgacaatcgttcgccgcggcgtaaaggaccctttattgtttacagtaaagagagataagatacctatccttagtctcgacgcctcttatatgattcaacctaaaacgggttatatccgtatcaaccgcttcggagcaacaactgccgaagagttcaaaaaagcaatgaaggacctccagaagaaaggaatgaaagatatgattcttgacctacaaggaaacggaggcggttatctcaatgcagccattgaccttgccaacgaattcttgggacaaaaagaactgattgtatataccgaaggtaggaccgccaagcgtagtgatttctatgccaaaggtaacggagacttccgtaatggccgcctcatcatattggtggacgagtatacagcttccgccagcgaaattgtcagcggtgcggtacaggattgggacagaggaattattgtaggccgccgttctttcggcaaaggcttggtgcaacgtcctatcgatttgccggatggttctatgattcgtctgactatcgcccgttactatactccatcgggacgttctatccaaaagccgtatggcagtacggtcgattacaacaaagacctcatcgaccgtttcaatcatggtgaactgatgaatgccgacagcattcacttcccggattcattaaaggtacagactaaaaaactaggacgtactgtgtatggaggtggtggtatcatgcccgattatttcgtaccaatcgatacgacattgtatacggattatcaccggaacctggtaggcaaaggggttatcatcaaatttaccatgcagtttattgaggaacaccggaaagaattagctaacaagtataagaagttcgaatcattcaacgagaagtttgtcattgacgataatatgttggctactttgcgggagatgggcgagaaagagggtgtgaagttcaatgaagaacaatatcagaaagcactcccacttatcaaaacgcagctcaaagcactgattgcccgcgacctttgggacatgaccgaatatttccgggtaatgaacacaacgaacgaaagtgtacaaaaggctttggaaatactgaattcggacgaatacgggaagaagttgaaataaacaagaacttcttctctcctatataaaaaatcacttttctctatcacctatcaccgacggcaatcaaacaccttattcatcggggtttccggcggtgataggttgtttttttaacctatcacctatacctgtcacctatcaccgtccagtcactccaccaaccaccgttcaatgttacgttgttcgtcactgaagcttacacctattttatataatgtccgtgaatcggaagcaaaagcgtcggcataccctttctcattgatttgtgccaaagcctcctcagcagtagccccctgcttgaactccatcacatagataaacttatcggttttcaagaccaaatcaatacgcccgcgagaagtgtgatactccacctgagtatagaaacccgccaaacgaaagacaatgaaaagaacattctggaagaaaagttcaacattgcgtaccggatcctgaccgacaatgacttcgtacggagcatctgcaaagaaactttgcagacgatggaagaaaccgtcaatattaccattacgtacttctcccacaaatctacgaatttcgaacggtgcctccgcctcactcttatcgatatagaaaggcatcagatatttcacgaatccctcttccacctcacgattgggataatccaacatataaagaccgaattccgggtcgtagtctttgatagtcaaatagccactctgataaatgacaggtatgggatttgtgccttcggaatcaatactgtccaacacatcttccgtaacttccaccttttcaatctcttcaagacggtaatgatgtttcttcaataagtagacaagataagaaggagtgcctgtggcaaaccaataactgccgaacgccattgcatcaaaagtattgagcaggctgaaaggattgtaaatgccggacgtgttgaaattgaaatgatatccgtcgtagcgtttctgcacttcaagacaaacggtctcataatccaatccttgtacatcggcaagggtatgcaggtctttgtcaaaataacgatgcagttccttgtctgtaatgccgcaaatatcaatataatcacggcgcatggagatatccttcagattgttcaggtcgctgaacacactcacctttccaaatttggtcacgcctgtcaggaaaccaagtttaatgtatccgtccatcgttttcagtacgccatagaaaggtttcagagtattacggtactccttctgcaactcttcgttgccgatagcctgcaacataggtttgtcgtattcatccacaaggatggcgacacggtgaccggtctgctccaccgcacgctgtacgattcctttaaagcggagggcaagagtcgtttcactaggtcccgtaccatactgttcctcccaaacagtcaaagcattgtccaatattttgtccaggctgtccggtgcatcatacttcccgatattcaagtctagatgcaaaacgggacgtaccgtccaattctgttccagttgttctatcgccagcccttcaaacaattcccgctttccacgaaagtaagcttccaatgtagaaagcagcaggcttttgccgaaacgacgcggacgactgagaaaataatagcttccggtagtcactaatttataaatcaacgctgtcttatctacgtaaatatagccatccctacgcaacttctcaaagctctgtatgccgatagggtaaatcctctgcttcattatctgtttctcctttccattcattagcgtatgacacgttgtacaaagataggactttttttccaagaaaagcccatccgactatgaaatcaccggtatatcacaagaaacatacgggacgaattactcaaacaagcggaaatcatttgcttttctcccttatatagtttacctttgaggtcgatatagtctattcttcacggccatgaagatttcctaccacagccgtgagaagatcctaccacgcccatgaagagatctcgtcacggccgtgacaaactaatgataaaggctccggaaggcaactatccttataccttaatccaacaacaaaggcaggacaatgtatatataaagccacttggcggcaaacaggcagtagcttgacagaaagtaagcagtagctctacaccaagcaagcgacagctatataacaataaaaacaaagatacaatggcaatacaatttgaattgtacaaaacgccccacccgaaggatgaggaaaacaaggaaacataccacgcacgtgtggtcaacttccaacacatcgacacggattatctggcaaaggaaatccaaatggccacttctctgaccgaaggggatgtaaagtcggtactcgaatcactgagccacttcatgggctatcgtctccgcgaaggagaaagcgttcatctggatggtatcggttatttccaggttaagctgaacagccaggaaccgatcacttcgcccaagctgaaagcaaatcagataaagctaaaagccaacatctgtttcaaggcagacgccaagttgaaaaggtctgtcagtgtcgtccatgtggagcgtagcaaactaagaaaccattccgcttccctttcgaatgaaaagatagacaagttgctgacgaattacttcaacgataaacctatgttaacccgcatcgattttcaaaggttatgcggatttacctccaccacggccgcccgccatatcaaacgactgaaagaagaaaagaaattgaataatatccatacgtattataacccgatttatgtaccaatgccgggatattacggcaaggcggaaataaaagaggatgaaacaaatgccataaagtaaagactataatagaatgagagataccttgcggcgaggtatctctcaattatttatatcccccattcataagacctacattcaattattcttattaatcaaattgattactaccttcaccatcacgtccttttcttccgtccggctttcagcaatcattaacgtaagtgctacgagcatattgttaccgattaacttcgaaccatcagatttatacagtataccgttcttctccagaaaccaaaggaacagaaaagcggcaattgtttgtgttcgatgacgttagaaagaagacgtacggtgctcttcaagtctgccatttgcgcctgtgtcagccacaccgtctcattctccaacttcacatcaatggaagttttcccatcctttgtctgataaatgacaatctttcctctattgtcgattaaaatgcttccttatttacgcattgtgtccgtccattaccttcgtagcaatggacggacacacaaatgtacagctttcaaaaagaaataaagaatataaagctgcttttattagttgctctgaagtgttattatagaacgtgccggaatatgaacggtctttccactcttcacttttcctaccggtagcaaattctccccttctttatccgaagtacgataaacctgccattgtgcattcccgactttttctttatgaatagaaaattctttctcttcattggcatagtttataacgactatcacatacgttccatccacgtttttgtaagcagaacacatcaatccttgctggtcagtgccgccatcgggaatgaaagtgtttgtttgatcgaaagctgaaacggataaccggactgcccccggacggataaaacggctgtaattgcctagagcccacatcagtttggaatcttccactctgccatccaagaaattatcgtccgtagtatattcacgaatcagtccgtctttataatcaccgccaatggcacgccaccattgccagctctttgcaccggcatatacaatatcatggtgaatgatacgggcgacataaagagctgtcttcatcgtacggtcgaatccatttcctcctccgatttcttcatcattgcccatgatgcaagtctccgtctgccaaaagtcaacatcgtgtttgtctaatgtatcccgcaactgactgcggatattgcgtaactcactcaaaggagtcgttgtccaatagctatgtcccagcattagtcggggaacattcggagtatcacccaaatatgtgtccacactgtccggacagaagaaagcctgaatctgatagccacgttgccaatctgtctcgtgcgtacggaacatacaacggtaatcggaagattcacttaccaaaatctgcgtatctatattccggttcacaaattcccggctcaacagacggacagttcgggctatttccctgttcgttgccggacaaccttcctgtttcggtcctacccaattccagtgtccgtccggctcattgaaaggacagatgtagttgaacttgataccatcgtgttgctctactccctgcactacatcggccaaaaaacggacgtacttctcataacagtccggtttcagatttgccgtaccgccgcgacccgtgtttgtagccaagccgttctgcgtataatagacgggaggagaattgaggaaagccagaaatttatcgaccccacgctccttcgccaacttcaggaagttacgctgcccctgttgcttgctccaattgtaggtcccgtccggctgcaagaaacattcggcacgcatccaaggagaagcaatctgactgtcgtcaccttgttccgcactgcctgcaccgacattgaaacgccaaagagacaaaccgatacctttgggctgtccattcgcatcattctccgtactgaacagccaatcggctatctgattctgcttttcctccggccaaagtccgatgaactgcatactccaagcgtcggaagcaccgaaataagtcattgtctggcagggacggtctgtttctagctgatagctaacatcagtggcaggttgggaacacccgcctaccatactcatgtagaagaagcctaaagaggccaagaacactttacttttcattacctacctattagaaaaccataatcattgaatatttttcaagactccacccccacgcggctgaataacccattgaaacttaccgtccttttttatatcgtattgttgcaactgtggttgtagcttcttatcatcgttataaaagtaaacagtctttcctgcaaacatagacaaattaagtttcaactttaagggttcttctgttgcatttacagccgctacataccaacaatcaccataacgacgagcaaggacgacatacttgccaggatacccatcaatgaagcaagtctcatcccactctgtagggatcgccttcataaagtcaatgcaaacttgaggagcatccgttaaattattcggagccaaagcaaaattctgaatcggattctgaaataaaacagcggtagccaattggaacgcatcggttgtcctccgtgtattaccgccatcgtttcctctattcagacgtttgttaagaaaacagccaccaaactccatacttcctacagcattacgtataaaaggatgcaaacatgcattaaaagcctcatcatcacagaaatgctgattaaagtatatattttccgaagccaacactgcctcgctacccacataattaggatacatccgctcccagccacgcggtaatgtacaaccatgaaagataaccatcagcccatgatcgtcggcatcactcaagatggcttcatacagacgcatcgtctcttgtttgtcaccgccaaagaaatcaaccttaatacctttcacaccctgactttgtaaccatttcatttcacgcttgcgagcgatcggattatccatgatattaataggactttgttctatgtcattccaataaccactcgaactataccacaagaacaaatctacctgcttgtcccgggcatacttaacaagttgctccatacgcttgcggcctatattcgcatcccaccagttatctatcagtacatattcataccccatagcggcagcaaaatcaatataacgtacttggtcatcataatttatactgctatcctgccaaagtatccaactccatgtaccacgtcccatccggtaatcatgttccgtctcatacaacggactgactacatcccatggcacggtagtttctactatcggcttcaaattctttcctacagttattgttctccacggagtagagcctggcaaagagaaagccggagccaccgttccgttaccattattctctccaggcataggaaatgcaacggtataaagatttccttctgccacatcactcagatgcgatccgcagtaatgactgtcaactcccgtttcactgaccagcacccaaccatcttctccaaccttgaacaaacaaggaaatgtatatccctgcccatactgcgaacgtacatccatcggcatatccgccttatattcttcttcgtaactaggtttggtccgcttccaagctatcattgcatcgctttgcggacaaagaaaagtggtagtctgaacagggaaacggaaacctgtagtttcagcattcactaccacacatcccatttctccttgacggggtaaggtataccggaaagctacatcattattgctgacacgaaacgtcacatccatcttttggcctttcccattagctaaagaacaaatcaattcgttagcatgataatgtacacgagacgtttttatacgtgattggacataaaaggtatcaatactgctgttcctatgccctgtcagtttcattcctttggtgaagtttcctacattggtttccagccccaaaggagaagtctgaagcatttgttttccatcataagaaagtgaataagagagttcacctccttccgcacacgacacctctatccgcaattttccatcgggactatccacaactacgttttgtgctcccaatgacgacacaaacgcagctaatacaaaagcaaatcctttcagtctgttcttcattctatacatgtttttaatgacacaacttatcgagttggtactatcggtctgatacttccgttatcattgaactccaaccgatctatacatacttctctgtgaattccgggagaatctttcagataattacgattgatacggtgataagcgacaaaccactgatctgttccgggcacttgcacaatagagttatgcgcaggaccatagattcctttttccggatcttgaatcaatatgacggggtctttcgccacttcaacaggacctaatggtgacttagaagttccgtaagctaaatgatagttgggagagcccgtatcgtctaccgaccatgtaaaataatacagcccattacgatagaacacgtaaacagcctcacggaaagcgtaatcttgtaaagtaccaccttcgggagtcatcaccgtaatagtttttttcttgatggaagtcatgtctttgtctagctccgcaccagccatgtaaccattcccccaatacaaataagacttacctgaaaccggatctgtgaatacatccacgtcaatctgctgtccgccccctgcgggagagtcggtgacaatgggataccccaagtctgtaaatggaccgacaggggaatcccccacagccacaccaatctgttttcctccaccttttaccggatttccactgtaataaaagaaatatttatatgtaccctttattagtttctcctcaacacaaggggcccaagcattcccatttgcccatggtacttggtcggacttcaaatccagcacaatgccctcctcttcccaagtccggagatcatccgaagaaaatgcggtaaaataccatccgccccaccccggttgtccgtctgtcgtagagtagatatagtatttctttgttttctgcgaatacagtatctccggatctgcatggaaaccgggcaacaccggattgttcggcaagtcaccaagttcttttggttttccccaacgatcagtaatgcgtagcagttcatcacgcgtaatcgggataatagtaccatgacgaggatgaaagttcatcttcacttctgaatctattaccttaaagttttttaagtcagtagtctccgtaaactgatatttaccttttatataaacatcatacataaggatgtatttatcctgcccgattagtttaaaagtgcctgcaccctccacagcctcttttgtctgctgtttgtagtccggactttccgtccagcttcctgaagtcagcgaagaagtagtagcaacttttatcccgttgccgttaccttctgttttataaaaaagatgaaaaagaccatccttataaacaatgtcagcatcaatacacgatgtccggttcttcgggacaaacaacactttcggctcgctttccaaatcagtaaactccttattggcataagcataatatatcacatccggaccaccagcatactgcattgaccaatatatcatatactttccggcctctcgatcaaaaatagtctgaggagcccacacacgcttcaaattctcctgacctttgtatcgtttctgcatattgacaatagaatgcgaccaattcaccaaatcattagatttcagtaatatgatagcacgattggaatcccacccattgccacataccatatctgtcagaaccatatagaaagtttttccatcctcagaacggagaatgtgaggatcacgaataccacccgtggaactgataacgttcgaatcaagcacgggtttattgtcattcaacgcccaatatgtatatccatccatactgacagcataatgcactgattcctcactgatgtgatttcctgtaaagtaagtaaatagataggctacataatctttttcttggacagttgtttgctgtggaaatgctggtagcatagctaccagcattagacttgtcgccaaagtgatttgttttatagtctgcatcattttctagaaatcaattaccaaacaatccatacgcatatatctcagacaaggaagtattgagtcctctgttactctcagtaatctgtaccttgaagtaacgccccttcatcggagtttctacagtaaagttctgaagaccgagaattttcttcatagtgaacttacctacttccgtccaattcgttttgtcatcactcacgtagaaaactccggaacccgtatcagtataacttgggtcctgcctttgcatcaatccaaactgagtgaaaacgtatgaatcgtttgtatcaataatcagttcatggggcaaggcatgagtaccgctttgccaagatgaatgccaataagtcgaagtgttaccatccaacgcacataccggtataccgtttccggtaccctcaccattcggttcttgtgtgttagcttctattgtccaagcagtacgctccagtttcggtcccaatatgcggactgtcaagggatatatatttttagtaggagaaatctcaaacattgacaccgttttaatacagatgggcaacatataatctccgggctgcaactgactggcgttaatcgtaacattcagttctgcattagtagtacctgagggaagtgtcatctgcccatcaaaagaataagtgccttccggcaaagtttggaacaaagtattgttttttgtattgtattcctcacgatacgtatcaactacattgaatgtacaatctatattccaactattctctgtatcaagtccaagaacaattttttcggatatgcccgtaccataattataatctttcacagatacatctacattttcaaaccctaaagaaggggtgatcactccagctatctgcaagaacagttcattcttatcactattgatggaatcgttttcactagtgacgaccaaaggcaaaacccatactacatccggattagcggctatagccgacttaatatgttccgggtcgagtgaaactgtaactgacttacagcgatctgtagtcaaaaagtccaaatgagtttccgctattgaatagcagtctgtatccatcaatttataattcaccgcctccggaccactatattcactatccaactcttcctgcgtcaaagtataaacatcaacactggcagtctgatctggagcactgcccgacttgaatatcgagaatgtatatgcatacttttcgcccgtatcatacaaggtcacctgctgcttcccactgttgttcacgtacaatattttatgatactgatcgggaaccaaactttctaaatcatattttgattcggcgcaagcagccaacaagaacaggcttcctgccaacaataatgtattctttattttcataatatgttgtttttagatcattaatatccgggtgcctgcaccatttgcggattgctgtaaagttcatccatgtcacttctcgaccatattggcaacaggtaggacctgtcaacccatttaaagggctgatcaattaaggtaggctggttgaattcctcaaaactcggattcttcaaaagaccattcaacccataacgcaatcctgccttcaacatttgcggagcaatcgcccatcggcgtaaatcgtaatagcggtgtccttcctcatacaattcgacaaatcgctcattacgtacccattcggtaatgctcattgttgacaaatcagtcgtttttaactctttgataccggcacgcttacgcacgatattcagattgattatcgcattcggcgcatcatccaatgcggcataacattccgccaagttcagatatagttccgccatacggatgaaaggacgtctggaaggattgtgcgtacgtgaaccatttgcgctaaacttaatgttcgggtcaatgtatttcttagacaaataacctgtaccgacaacgttgcgttcgtcagaggcatgccatccattggtattggtattcttaaagtttatccaaagcggatttccatcgtttatctttttggcatattcacaaccatcgaatgcaatccatgcatagaagcgtgcttcccggttagcattcagtttgataatatcatttttcacatcttcgccatccaggttgtttgttgcaagtgcagggctcgtcgctccctcataaaaacgtgtataccaatcctttttcaccgggaatttggcatccaactccggcagttctccattctctgtataaaaatgctgcactgcatacaaagtaggtgccaagccagcccatcctccaaccagcgttccgtcacttttcttcaccacacgattcggcaaacgtgagtccgtcgcctctcccccattagtaacatccgcatcaatacgttgtccccagataatttctttattgttgtctccttcattggcggtaaccaaatactggaacatacggacacgttctttaaatttcttattctcaggagtgtcatcttctttacccggaatgaaagggagtcccactccgtcacgttcagcctttttattggctgtttcaatatcaaacagtttgtaaccagcgtcatcggcagcagtcaaagcttgttgacaggcaatcagtgcacgatcccatttttcttttttataagtagtgttcaccagttccttgccatattccggtgtttcatagttcacatttttccagttaggatcaaagaaagagccgttccatagcggtgaagcagcataaagcaggacacgggccttcagacacttacagatggtggaagtggcacgtcccaagtcttccgtcgttctgacagccggaagtatatgtgccgcatcatctagtttatttacgatataatctacacaataatcgaaatgtgagcgtcccggtattccgtcatttgtgatattcggatccactttctccgtaatcagcggacagggtccaaaagcctgtaacacgcgaaaatgataatacgcttccaagaaatagcattctgctttatactgtgctttgtcatcatcggtcactccaatcggatgcaattcgtctatcaagctcaagaaatggtgtacatatccaagccaattgtaactcggagtccagatattcatatcatcccctccccaactattataataagaaggtgaaagaatcccccacgccatctgttgttgatagtcatcccacattttaggtgatgcaatctcatctgccgagtactcgaatgattgaaagttgaacggatgtacacgagggacataaccatagcaagtgtacaagaaccccaatgtggaggcttcgtctttcatcgtatcatcaaagtccgcctgtgccggcggaataatatccagataattgcaagaagtcaacaagcaacaaggaatcagtagaatccgtgatattcgggctattttatatattagtttcatacttctttatttgttataagttaaacttgttttttagaaagtcaattgaacacctaggttaaaagtacgttgcaaaggatatgagttccatgaaagttccggatcccaaagtttgaacggactgaacaccgctaagttatcgccactaaagtaaacacgacaatacggaaaacgataaccaatctccaaactcttaaacctcaagaaattagcattccgtacccaaaaagaactagcttgggtgttgttggatgtatcggcactagtgatccctaaccgaggataagcagcatttggattcggattatctaccgaccaatggtcatcagcaatccactgcatcaaattacgttccagactttctgttgtcataccgtcgccacctgcagaaaggaacggggcatatccactgttgatcattattttacgtttggcagagccgttgaaaaaaacgccgaaatcaagtctcttatataccacattcagtccgaaaccgtattggatacgaggaatcttattataaggagacagcatcactttatcttcagctgtaatcgctccgtcgccattgatatcacgatacttgatatcacccggcttgatgttggaacctagctgagactggtcgggccaattggctacctcatcttcactagcgaacaacccttcagctatataaccagtcaacgtgttcaatggttttccggttttagtctgccacacataaggataattcggttcatctacgtatttgtattcattctggttgtaagtaaagttaccacgaaaatccacgttccagtcttttccaaaatgtttgttccagttcacactcaattccacaccacgatttacaacctcaccgatattactccatggcaaagagccccaatatcccaacatcgtaggccaagaagcacgtgacatcaagatgcggtcacgatgatcatgaaaatagtcaaaagtaatattcaactgattgaacaacgacatatcaaaaccaatgtccaacttcttcacatgttcccaacctgcattctgaatagccagaatattgaaagcgggacctctcctgtttgtttcattcgatggaaggccagtccagaaagtatgtgccgtaccaatgctaatgttattctggtacagaaaatgcggagcaccactattaaattcgtcactaccaaccaaaccataagaagctctcagtttcaaatgatcaacatatttactcatcggatcccagaacttctctgaacttaccacccaaccaatggaagcagctggaaagaattcaaaacgctcaccggatgccagacgctcagaaccgttatatccaaagttgaattcaaataaataacgattagcgtaatcataagtcaaacgtccggaatagccttgattacgattaggcaatataccaccacgatattcacgcatcatatacatcaacattgctgtcagattatgatcaccgaaattgcgtttccagtcggcacggaaatcaaaataaaacgtttgatcagcacttctgctaatatccgattgactaacataatcagctccggtctgtaatgtctgaagttcatactctcccgtttcagcgttatatgagccatcttttaccttataataataaggtttaatggaacggtcataggcagactccgaccaattcttaaaattaaccaaagctttcacactcaatcctttagtcaggaaacccaaatcctgtgtaatatctaaagatgtattcaatgtgttgtaattggtttccttaaaggagctcatcatataggcatatggattctgcccgtatacaccggattttatttcagcattaccaaaacgtatactttcgtccgcattctcattcggaaagtaagcaggaaacgctaccggattagtttgcataacaattttatacaagtcagaggtagaataattcggtccttgcttattaccaatttgcgacatcatacgcaaattaactgttgtcgtattagtcagtttatatgagatattgttttgaaagttatactcccaattatcaatgtttgaattgtagtaataattaggggcatcaagtaatccggtgtcatgattggcttgcaaactcatataataagtaacacgcgaaccaccgcctgacacattgatattggcacgctggttgtagttaccctccctaaagataaggtcataccaatcaacatccggatacgcataaggattaaccccgtttatggtattcgttatttgttcatctgtatacttaggagaaacgatcgtagtcgcacttctggcttgggcagcttcattataggtacgcatataggttgccccatcagcaaattccaccttattcatcggacggaaataggaagcctccaaagatacgttgatggttgctttcgtattttcagcacctctttttgtcgtgaccagcataacaccattcgcaccgcgattaccataaatggcagttgcggaagcatctttcaagagagaaaaactctcaatggactcggccggaattcgattcaagtctgtagaggagatttcaactccatccaacagaatcaatggagtggaacgcccaccaaaggtattgataccacgaatatagaaatcagaagtagagcccggttcgccactattggtgatagcgacaatacccgaaagttttccagccaatgaactggttagtgaagaggaaggaagtttaagtgtagcacctttgacagtagaaattgaaccggttacggatactttcttctgagtaccggctccgataacgacaacttcatccaacatctcattatcagattccattttgatggtcatcacacccaaatctcctaccatcaagacctgtgtcttatatccgatataagaaacttcaagttctgttttgcctgtcaccccaatggaaaatttaccatcaaggtcggtaatcgtaccctctcctgttccttttactctcacattgactccaatcagcacatctccggtacttgaatccattacggtacctaccaaagtacgtttccctaaagtcttttccttagcagacacacgtttccccgtgtttaactgttgagcatgtcccgacaaacaaagtagcagacataacgctaccaacaacttttgcttagaattacaaaataatcttttcatcatagtattatataattaaaatagacgtttcagaaaactccggttcgctgtgaaataccaacaaggtttcccttgattcacgatacaaattaatgtaataaaaccgaagtaacagaataaaaatcatgcagagaagctatacaaatcgtgcaatgcatgatttgtatagtctaaataaaatatttattcctatttttgaggctgaatataaagtacataaatgcaaatcatgaaacagtacaccattctcgcactcttactttggtcatcttcctacctgttgatggctcaaccttatattattaaacgattaggtatagaacagggactttctaataattacgtagtcggtatcacagaggacaaacaaggttctttatggtttgcaacagaagagggattaaataaatttgacgggatccgcttcatgacatattacaagaacgacctatcccaaaattcacaaagtatcacaggcaatgaactgaacaaaatatacgctgatacaaaacgtcctattatttggattgctacccaacgtaacggacttaatgcttacaattatcatacgcaaactttcacaagctaccagaatgactcacaaaacgtaaacagcctgataacggatgatatcaccgacatcgctcctgccgctcaaaacacaaacggtctatggatctgcacttattacagaggtatagattaccttgatgtatccaccggcaaattcacccactacaataaaaccactgtccccgcaatggaaagtgaacaaacatggactgtgctggacggaggagacggaaatatttatatagggcatgtatatcacggactcagtatactttcgctgaaagaccgaagtattagaaacttccaacatgaagagggaaaccctaacagcctgcccggcaatgaagtcaatgcaattttaaaggacactaacgggaatatatggttaggaacaagtgggggactggctatgtataatgaaaacaatcagaacttcataaacttccagcacaaccaaagcgataaatatggtactctttccagtcgtatcttctctatcaaacaactaaaagacaatacactctggatcgctaccgaattgaatggaatagcaatactggacttaaagcaggcccaattcctatcacccgaacaaataactttcaattttattcgaaaaggtgatgacagccatagtctttccaatgccagcgtacgctatatttatcaagactcctttgacaatgtatggctagggacatggggaggaggcattaattttattagcagcgaaccatcctggtttagcactattgagtattctcccattcccgacaataataacagtctaaacaacaaaatagcaagcagtctctgtatcgataaagaaggacgtttatgggtcggtaccgatggagggggaatcaatgtattcgagagtaataaacggaccgctatttataaaaaagagacaggagcattactatccaattctgtccaaacagcattccgggattccaaagataatctatggttcggaacttttgaaggaagcatcagtttttatagtccatatacaaaaactttccgtttaataaccccaatgggaaaaacgaatctggatgtccgtactttccacgaagatgaacggcaccatatctggataggatgcagtcaaggaatatttgtatacgattcggacaagatgaaagtcatacaacattatgacacaagtaatagcgaattgcacagcaaacttatccgaagtattatacaagatgaaaaaggacgtttatggatcggaacattcggagatggattaggaatatatactcccgatctccatctgatcagaaggttcgtacaaagagatggtttctgttccaacaccatcaaccaaatatatcaagacaaagaaaaaagaatgtgggtagctaccggcgacggactagtatgttttaattcgtcagatgacaaaaactataagacttaccagcgtaaagaaggacttatcaacacctttatccaagctatcacagaagatcgactaggaaatatttggttcagtacaaacaaaggactcggctgttatgtaactaaaaaagcccgcttccattactatggccattcggataatattcctgccggaaactttatgagaggcagcgtcactcaaagtgcaaaaggttccatttatttcggttcaattaatggagtctgttgttttaccccaagcacgatagtaagtggatttaaaattcctccagtagtcattaccgaaatgaaagtatttgaacggttgggtactcaagaaaataatgagatacttattccactgtctccaaacaaggagataaaactaacacataatcaaaatactttcgggctgacattcaacgtacaaaactactctctggtcaatcaagtggaatatgtgtatatgctgaaaggactagaaaattcgtggtacacagtcaatgaaaacaatagcgtgacattccggaacattcctcccggaaaatatgagtttcttatcaaagcgcgcattcacaaccaggaatggccggaagaagccacctccctgactatccggattaacccgcccctttggctcacctggtgggcaaagcttatctatgtcctgatatctaccggcattgtatatctcatccttcacgcatataagaaaaagctggatttggaaagcctttacacattggaaaagaagaatcacgaacaagaacaggaattaaatcaggaacacctgcgtttctataccaacatcacacacgaactgcgtacaccgctaaccttgattctcggtccgctggaggatatgcaaaaggatacctcactcccggtaaaacaagctcagaaattgtcggtcatccaccaaagtgcattacgcctgctcaacctcatcaatcagatattggagttcagaaagacagagacacaaaacaaaaggctgtgtgtctgcaaaggcaacatcgcccctttgatctatgaaataggtctcaaatacaaagaactgaatcaaaagacaaagattgatttccgaattcagatagaaaaagaagaaatgcttcttttctttgacaaggaaatcgtcaccatcgtattggacaatctgatttccaatgccatcaaatatacggaacaaggatgtattaccctaagcctgtatcagaccgtgcgcaatgaggtggcatatacggaaattaaagtaagcgacacgggatacggaatttccgccgaagcactgccacatattttcgaccgttactatcaggaaagcggcaaacatcaggcatcaggaaccggtattggtctggctttggtaaagaatctcgtagagctgcatgaaggagaaatccgtgcagaaagtgtgcaaaacgaaggcagcactttctgcatcagcctcttgacggataatatctatcccaacgccttgcacaccgactctaccgaacctgcggcaaaagaggatactgcccaagcaacgacctccgaaaacacttcagaacctacagtagacaatggcaaaccgatcttactgattgtagaagataatgaagaaatacagaaatacattgccgaatccttctccgactcttttgcggtaatcacagccgataatggagaagaaggaaaacaacaggcgctcagccacatcccggatatcattgtcagcgatattatgatgcctataatggatggtattaccctatgtcggcagttaaaggaggatgtacgtaccagccatattcctattattctgctgacagctaaagattcgctacaggacaaagaagaaggttatgaggtaggcgctgactcttacctgacaaaaccgttcagcgcttctcttttgcgcagccgaatcaataatctactcgaatcgagaaagaaactgattacccaattccaagcacagcctgtttcgggtaatcagacggatttgaacgagaaacgtatcataatagccgaggctctaagcaagctggataatgagtttattgagaaaataactcttttaatcgaagaaaacctctcttcagagaagattgacatcacttatctttccgacaagatgtgtatgagcggttccactctttaccggaaaatgaaagcacttaccggactttcaaccaacgaatatatccggaaggtgaaaatgcagaatgcggaacggctgttgctcgaagggaagtttaatatatctgaaattgcctataaagtaggaatgaacagtacaggctatttccgccaatgctttaaagaagaattcggtgtctcaccctcagattatctgaaacagataaagcaggtataaaaaactaaatgcagattctcgcaaagaactgatattcaaatctgcgagaatctgcgtttaaatgacaattacagtctacgactctactctttattcaattcttcaatcatggctttaagcaatgattggctgttatccaacggcaaatctgtagccaagtcccaactcatcattcctttcaagccctgctctttcgcataacgtgtcttgatacggatattatcttgcccgtcaaacacatacacttctcctttataatttacttcattctctgccggactcgtaatcagcccattctgcacaaaactaaaataagcttcagtctttttcgagttatcctttgtcactccataaaagggaactcctgccaccagcttctctttcggaataccatatttcaataccatctgtatatccgaacaatatttctctaccggaaaacgaaccggtgaaggaccataacattgaagtgaaataaaatcaacggcagcaatcgcctccttacttatcttataagaaaccggatgcagagatacgctgagaatgtatttatcgcccagcacttccctcatcttgagaatagccaaactgtaatcctcatattctttcgcattctccgcccattcaaagtccaggtcaatgccatcaagcttattttgttggagcactttctttatattttttgcaaatgccgtacgggcggtctcatcagccaccatcgccttccactgaccactggaagctccaatccgtactttcgccttcgtccctttcacctcagcacgaatggattttatcaatccctcccaagtagtgactcctttaccttgaaatgcacgagggttctcaaaagagagcgatccgtccttattgggatggacatttaatagaataaggtcgtcgcttgcccgcagactttcagtagcgacacgtcccctgttgtagaaatttccacgcacataagaacttacaaaagatttctgttgtgcataaagacatacaccgaccaacagaaacaaagaaaagataatctttctaggtattagcataacgattaatattttatgaatttcaaccacaaaagtatgcactctcagcataaaatgatgttcaaaaattactatataacttccaataatcaacagaaagagcacaagtttacacaaaaaatcctatctttgttccctgatgataataattcacgaataagaccgatgccagaagattcattttgtatacaatataagaattgtacagggtgtccaagagctactgaaaacactctcgtatataagaacttacccaaaggagaacacattcctaaagataagtgcacgcaaaattgtatgcttttcatgcttaaaggcgaattacttatcaatagtgaagagtacccgggaaataccttacacgaaaagcagtttatcctacaggccatcgggtctaaaatagaaatactggctcttacggacgttgaatacatcacattctggttcaacgaactccctctactctgcgaagaccgttacaatgagataaaagatcaagcggaagcacccttgacctacacccctctggtgatgagcgaaagaattcattcccttatcagcagtatgcctgacttcctcaatgaaaaatctccttgcagcaaatatatcgaactgaaatgtaaggaattggtattcctgattaccaatttctatccgctacctcaattaaagactttcttctacccgatcagtacttatacggagagcttccaatacttcgtgatacaaaattacagcaaggtgaaaagtgtggaagaatttgcacatctgggaggttacacaaccacgaccttccgccgactcttcaaaaacatgtacggaatccccgtatacgaatggatactggagaaaaaacgggaaggcatcctggatgacctccaacacactaatatgcgaatcacagagatatgtaaccgatacggattcgactctctgtcccactttgcgcacttctgcaaagactcttttggtgacactccacgcgccttacgcaagaaagcagccaatggtgaaaaaatcggaaagattagcgattaaagaattatttctttaattccttgctcaatcaatctatttcccctatttttgcagtccgtaagaggtgtaaaacgtcgaaattttagttctaacaattaaataatttaaattcaatcatttatgtggttaagtaattcatctgtaggaaggaaagtggtgatgagcgttaccggtatcgcccttgtcctgtttctaacatttcacatggcgatgaacttggttgcaatcatctcggctgatggttacaacatggtttgtgagttcctgggagcaaactggtatgcgttagtggctaccgcaggactagccgctctttttgtgattcacatcatctacgcattctggctgacaatgcagaatcgcaaagcgcgtggtagcgaacgctatgcagtggttgacaaaccaaaaactgtagaatgggcatctcaaaacatgttggtgctgggtctgatcgttatcgtaggtcttggtttgcacctcttcaacttctgggcaaaaatgcagttgccggaactgatgcacaacatgggcatgcacgctgatacactgacgctggcttatgccgctaacggtgcttatcacatccagcagactttctctagcccggtttacgtagttctttacctcgtttggctgtttgctttgtggttccacctgactcacggtttctggagctctatgcaatcactgggatggaacaacaaagtatggatcaatcgttggaaatgtatttctaacatctattctacgattgttgtactcggtttcgcactggtagtagtggtattcttcgtgaaaacactgatttgtggcggtgcttgctaaatagtaaattgtaaatgattaaattgtaaataatattatgatcaagatagattcaaaaattccagaaggcccggtggctgagaaatggactaactataaagctcaccagaaattggtgaaccccgctaataaacgtcgtttggacatcatcgttgtgggtacgggtctggcaggtgcttctgccgctgcttcacttggtgaaatgggtttcagagtattcaatttctgtattcaagattctccccgtcgtgcacactctatcgctgcacagggtggtatcaatgctgcaaagaattatcaaaatgatggtgactctgtttaccgtctgttctacgatactgtaaaaggtggcgactatcgtgcccgtgaagcaaacgtatatcgtttggctgaagtgtctaacgctatcatcgaccaatgtgtagcacaaggtgttcctttcgctcgcgaatatggcggtacattggacaaccgttctttcggtggcgcacaggtatcccgtactttctacgctaaaggccagaccggtcagcagttgttgctgggtgcttactccgcattgagccgtcaggtaaacgcaggtactgtaaaactgtatacccgttatgaaatgcaggatgtggttatcgttgacggacgtgcccgcggtatcatcgctaaaaatcttgtaacaggtaaactggaacgctttgccgctcacgcagtagttatcgctaccggtggttatggtaacgcttacttcttgtctaccaatgctatgggttgtaactgtacagctgctatctcttgctaccgcaagggtgctgtattcgctaaccctgcatacgttcagattcacccgacttgtattccggtacatggtgacaagcagtctaagctgactttgatgtctgaatctctccgtaacgacggtcgtatctgggttccgaagaaaaaagaagatgctgtgaaacttcagaaaggcgaaatcaaaggaagtgatattcctgaagaagaccgcgactattacttggaacgccgctatccggcattcggtaacctggttccgcgtgacgttgccagccgtgccgctaaagaacgttgcgacgcaggtttcggtgtaaacaacacaggtttggccgtattcctcgacttctctgaagctatcaaccgtttgggtatcgacgttgttcttcaacgttatggtaacctcttcgatatgtacgaagaaatcactgacgttaatccgggcgaactggctaaagaaatcagtggtgtgaaatattataacccgatgatgatttatccggctatccactatacaatgggtggtatctgggtagactacgaactgcaaaccactatcaagggtctgttcgctatcggtgaatgtaacttctccgaccacggtgcaaaccgcctcggtgcttctgcattgatgcaaggtttggctgacggttacttcgtattgccttacactatccagaactatctggcagaccagatcactgttcctcgtttctctaccgatcttcctgaattcgctgaagctgaaaaagctgttcaagctaagatcgacaagttcatgagcatccagggtaaagaatctgttgattctatccacaagaaactgggtcatgtcatgtgggaatatgtaggtatgggacgtacggcagaaggcctgaagaaaggtatcgccgaactgaaagaaatccgcaaggaattcgaaacgaacttgtttatccccggttctaaggaaggtatgaacgtagagcttgacaaagcaatccgtctgtacgacttcatcacaatgggtgagcttgttgcttacgatgcattgaaccgtaacgaaagttgtggtggtcacttccgtgaagaataccagactgaagaaggagaagcaaaacgtgatgacgaaaacttcttctatgtagcatgctgggaatatcaaggtgatgatgaaaaggctccggtattgcacaaagaaccgctggtatacgaagctatcaaggttcaaacccgtaactacaagagctaatcggtgaagttaaacatttaaaagaattagaagaaaatggataaaaatatatcatttacactgaaggtatggcgccaagctggtccgaaggctaaaggtgcttttgaaacctaccaaatgaaagatatccccggcgatacttccttcctcgaaatgctggatattctgaacgaacagctcatcagcgaaagaaaagaaccggtagtattcgatcatgactgccgcgaaggtatctgcggtatgtgttctctttacatcaacggacacccgcacggtcctgcaacaggtgctactacttgtcagatctatatgcgtcgtttccaggatggtgatacgattactgttgaaccttggcgttcggccggtttccctgtcatcaaggatttgatggtagaccgtactgcatacgacaagattatgcaagctggtggttacgtaagcgtacgcacaggtgctccgcaggatgctaacgctatcctgattccgaagcctatcgctgacgaagctatggatgctgcttcttgtatcggttgcggtgcttgtgtagctgcatgtaagaatggttctgctatgttgttcgtttctgcaaaagttagccagttgaacttgctgccgcaaggtaaaccggaagctttgcgtcgtgcaaaagctatgttgtcaaagatggacgaactgggatttggtaactgtacaaacactcgtgcttgtgaggctgaatgtccgaagaacatctctatcagcaacatcgcccgcttgaaccgtgactttatcagagcaaaactgaaagactaagttactgttttctaatagtaagagcttaatttgattaataaaagaatcccctgcggtacacaccgacaggggattctctttatgtatgaatggctcatgattattattaataatcaattatcatgaacagatatattggtaatattaaagttatttatacagctaaatccaaaggcaagtcactgatatctttcaaccgttttccctgaatcaagatgttcaataattcaatagaatcctctgcatgggtatcatgaaccgctttgatgagctcatacaaagcaaaatgataaatacagtcaatatctcctgtgcctaaagctaatgatgccaatcgtgcgggcattggttctcctgttaccacaacaatgtgcggtaagtgcccttttctgttccttatcaatccgagagcttctgtccggctgttttgtgcacgatcgctacgcatcgtccatttggctgaaatagaagcatgaagaatgggtaacccgccattactttttcgtatatcggcaagattacacacggaatcatcaataatatcagttttctcatttatcatatcatccgtctctgtctctcgataaataaccacatccggtgctaccatataatcgttacccatgctagcggcaagtcgagcatcgcttttggtcagcaggctgaggtattccaaatgttcgtattgagcaaaactacttgttttgacggagttacggttacccagtttggagatatgccattttcccggacgtaaattctgcaggtagggaaatgtattcatcaagaaattcatattcatttgctcaaatttagcacccgaagtctgtcctactgctttttcgtggacttcagccattaattggtcagcaatgccgcgggcaatatttattgatagtttggaggaactgtcagcattacttggaattcctttgctatcaatagtcattacaccactagatagcagctctttgtgatatttttttctcgcttctgcaataagtgcgttcataatccaatacctttttgatttgcaaccctattttcatagcaacaggaggagggaaagcattgccgatcatccgacaggcaatcgtcttacgcttgccgaaatcccaactatcggggaatccctgaagtcttgcaagcatttccggagtcaatcgtggcattcccacgaagtctgcgtcagggacatcattagctaccccccgaccgtctacaccaagctctgcccacgccttacgtgctcttgtcgggcccaagtctggacctccgtgttttttacttccgcctaccagagtgggagctattttattggctgtccgcctccattcttcgacagctttccaaccattagctgacatcaagtcatataaagtctcacctacagacagtgttttctctggtatcttttcgggaaacatgaagacatctgccagatctctccgtattccaataataattactcgtggccgtagctgaggaacaccataatcagaagcatttaataattgaagatgtgtactgtagcctaattttttcaacgtttgaagtacctgttcccgataagcattaaacttagagcttaaaattccacggacattttctatcataacgatacgcggattaatttcctgcacaagtcggagcatctgaggaaaaagatcacgctcatcatcagctcccagttgtttgcctgcaacactaaacggagggcaaggtacgcctcctgctagcaaatctatctgcccgtagtaaggcttaccatcaaaatgatgcacatccttacagaaaatattccattcctgacgattgcgtttcagacattcgcaatagtctttttcatattcgaccaatgcaacatgagagaatcccgccatctcaagtcctaatgcttgaccgcctgcacctgcacatatttctatggaattatacatataaggatcattcaagtttataagtttcggctgcaaagttactacaaaaaagtgaaatgcggaaagatatagtgatagaattgagttacaagggttttggttgaagtggcgataatccgtgaagccattacaatccctgccgaagccaaatcctgacgccgctacgttacttgttcgtaaccatgcccgaaaatgcgacaaacgggtacgaatagcgaaacaaggctctaaggaatagtgagttatccataactcatgcgaaaaatcaggttacggaaaaagattgcgccgttcctccccgttttgcgtaccaacaccggactcttcaccaactaattttgaaacccaaaaattaaggacaatgaagagtacattttcagtaatctactacctcaagcgtcaggtagtgaaaaaggacgggacagttcccgtcatgggacgcatcacggtggacggcagccagacacagttcagctgcaaactgactgtcgatccgaaactgtgggacaccaaaggtggacgtgtcacgggcagaagcacggcggcactcgaaacgaaccgtatgcttgacaagatgcgggtacgcatcaacaggcattatcaggaaatcatggagcgtgacaacttcgtcacggcggagaaggtgaagaacgcctttctcggactggaacaccgctaccacacgctgatgcaggtgttccgccagcacaacgaggactacgagaagcaggtggaggcaggcatgaaagccaaaggcacgctgctgaagtaccgcaccgtttacaagcacatgcaagagttcctcgacatccgctaccatgtgaaggacatcgccctaaaagagcttaccccggctttcatctccgacttcgagatgttcctgcgcacggacaagcactgctgcaccaataccgtgtggctgtacgtctgcccgttacggacgatggtattcatcgccatcaacaacgagtggctgacgcgcgacccgttccgcgagtatgaaatcaagaaggaggaaacaacacgcagtttcctgaccaaagatgagatccgcctgctgatggaggggaaactgaaaaacgccaaacaggaattgtaccgcgacctctacctgttctgcgccttcacggggctgtcgttcgcggatatgcgcaaccttacggaagagaatatccgcacctacttcgacgaacacgagtggataaacatcaaccgccagaaaacgggcgtggtgtccaacatccgcctgctcgacatcgccaaccgcataatcggcaaataccggggactgtgcggggacggcaggatatttcccgttccgcattataacacgtgccttgccggtatccgtgccgtcgccaagcgttgcggcatcaccaagcatatcacgtggcatcagagccgccacacggcagccacgacgatattcctctccaacggtgttcccatcgaaacggtcagctccatgctcggacacaagagcataaagacgacgcagatttacgcaaagataaccaaagagaagctcaatcaggacatggagaaccttgccgcaagattgaacggcgtcgaggaatttgcaggttgcaccatctaaaaagaaaagccatgaaacgtgacacaatcatcatcgaggacaaggcagtcagcgtaaccggtaacgacgtgtggatgaccgccaccgaaatagccggattgttccatacgaccgtcccggcagtgaacgccgccatcagagccgtccgcaagtcggacgtgctgaacgactacgaggtgtgccgctacatgcagcttgaaaacgggctgcacgcggacgtgtacgcccttgaaatcatcatcccggtcgctttcagggtgaatacctacaacacccacctgttccgcacatggctggtgggaaaggcactctcacaagagaaacggcagacatacgtgatgttcatacagaacggaaaagccgggtattgctgattgcacataccccataagacaagtaaacgggtagcaccacaaaaggtgtcacccgtttactttttcatgaaaccgcctcactccagcggcttgcggtagttcgcttccagtaccccgcgcagccccgtttccgggtaaagcaccttccctcccaaaagtatgaagggcaacacgcggttgttgcggtattcctgcaaggtgcgccggctcacacggagcagttccgacacctcgccgtccgtcaggtaacgttccccgtccagcggaggacggtagctttccagaaatgcggacagccatttcgagcctttgcgcatatcctgcaccacagaggctatcggctcgtcttccatcgtaaaaacatcgttgttctcgttcatcataacttcggattcagtgggtgaataaatcaaatcatctgccgtgcggatagagcgtgccgacaagcggtatcagccgcttcacctcctctggcttgtaatagaacctgcggtttatctgcgagtagccgataagccgcctgtcacgcagcgtctgcaacgtgcgcgggcttattctcaactgcccgcagacctcctcgcccgtgagccatctttccatgcgccccgtgtcgcttttgcgcctcagggcggcgaccttctccgagagtgcgccgaatgccgccaccatcatctcgaaagtctttttctcgatagatactatttccatattcatgtcatttagagtttgccgcaaaggtaacgaaacggcatacaagacgtatcgttttccgctgaaaggctgcctgttgcgccgtttgaccgggttacggagccatcttccgcaaaaatcttacgtgagtcacgtagtgagttgttaaagccccttttgtttattgccgaattttgtcgcagaaacaaaaagaaaggactgaacatgaaagtgataacaatggaaagttccgcctacaaggagatgatggcgcagattgcgaacatcgcagggtacatccgcgaggcaagggacgagaagaaacggaagcgggaaaccgaagacaagctgcttgacacggcacaggcggcgaagatgctcaacgtgagcaagcgcaccatgcagcgtatgcgcaccgaccaccgtatcgagtatgtggtggtacgcggaagctgccgctaccgcctttccgagatactgcggctattggaggacaacacagtaaggaacgaggaagggacaatagacaccctgttccacaaccacacgctgcgcacgggcggcaaaccaaaaggaaggaggacataggtcatggaactgctcacacgaaacaacttcgagggctggatgcagaagctgatggaacggctcgaccgtcaggacgaactgctgctggcgatgaaggctgaggggaaacagcccactatcacggaaagcatccgccttttcgacaatcaggatttgtgcatgttgctccagataagcaaacgcaccctccaacgctaccgcagcgtaggcgcattgccctacaagacgctgggcaagaagacctattacagcgaggaggacgtgctgacattcctttccaaccatatcaaggacttcaaaaaggaagatatagccttctacaaggctcgtatccataatttctttcataaataacccattaaaacatttttcagatggcaaagaaaaaagacgaaaaggacgtgctggtagtccgtgacgagaagacaggcgagatcagcgtggtagccgggctgaacgcggacggcacacccaagcgcacccccgcaaaagcggagaacgcgcagagtttcctgcaattcgaccgacatggcgacgtgctggacaacttcttcaagaacttcttccggcagtgcaaggaacccagccgcttcggtttctaccgcattgcggcagaccaagctgaaaatctcttagaggtgatgaagcaactgctgaaagaccccgaagcgaacaaggagctgctcgcccctcacaaggtggacacctccgactatgagaagaaggtgcaggaagagatggcagcacaacagacagagaaacaagaacctcaaaaacaggagaacatggaacaacggaaagaacagcaacaggacaaatccgaacagatgcagggcaaacgtggctaccagcccatcgacgagagtaaaatcaactggcaggagctggaggacagatggggcgtaaagcgggacaaccttgaaaagtccggcgaccttacgaagatgctcaactatggcaagtccgacttggtaaaggtcaaaccgaccttcggcggcgaatcattcgagctggacgcccgcctctccttcaagaaggacggtgagggaaacatcagcctcgtgccgcacttcatccgcaaggagcagaagctggatgagtacaaggaacacaaattctccgacaatgaccggaagaacctccgcgaaacgggcaatctcggtagggtcgtggacattgtggacagggaaacgggcgagatcatcccctcctacatcagcatcgaccgcaagacgaatgaaatcacggacattccggcaagcagggtgcgcatcccggagcgcatcggcaagacggaaatcaccacgcaggagcgggacatgctccgcgccggactgcccgtacgcgacaagctcatcgagcgcaacgacggcagaaagttcgtcaccaccctgcaagtgaacgtggagcagcgcggcgtggagttcgtgccgggaaccggcaagtcgccccgtaccgcacagacacaggaaaccaaaggcgacacatcgaaaagtcaggcgcagggcggggaaaatgccgcacagaccaagaaggagcaacgccgcaacacgtggacgaacgaggacggcagcatccgccccatcagcaaatggagcggcgtgagcttcaccgaccagcagaaagccgactatgtggcgggtaaagccgtgaagctggagaacgtgaccgacaagcagggcttccatgccacgatgtatatcaagttcaacccggagaagggacgcccgtaccgctacgacacgaaccctgacaatgcacagcaggttgctccgtccaacgagagccgcacgcaggtggcggtgaacaacgatggcaagaccaacgaggctacaaagaatctgagagagccgttgcagaaaggtcagaccaacccgaaggacgcccgccagcaacagcagcaggagaagccgcagaagaaaacgggcaagggcatgaaaatgtaatcccgtgtccgccactgaatccaaaataaaatccaaagtatcaacaaaaaagaagaagacatgaagacaatcattgcagaaaagccctccgtggcacgtgaaatcgcccgcatcgtgggcgcgacaaagagagaggaaggatatttcgagggaggcggttatgccgtgacatgggcattcggacacctcgttcagcttgccatgcccgacggctacggcgtgcgcggatttgtccgtgacaacctcccgattattcccgacacattcacgctcgtcccccgtcaggtcaggacggagaaaggttacaagcccgacagcggcgtggtgtcgcagataaaagtcatcaaaagactgttcgacacaagcgaacatatcatcgtggcgaccgatgccggacgcgagggagagcttatcttccgctacctctaccactatacgggttgcaccactcctttcgtgcgcctgtggatcagctctctcaccgacaaagctatccgcgagggactgcggaaactcgaagacggcagcaaatacgacaacctctacctcgccgccaaagcgcggagcgaatccgactggctcgtgggcatcaacggcacacaggcgttatccatcgccgccggacacggcacgtattccgtggggcgggtgcagacaccaacgttggctatggtatgtgaacgctactgggagaaccgccgctttacgtccgaagcattctggcagctccatatcgcaacggacggttgcgacggcgaagtcgtgaaattctcatcctccgagaaatggaaagagaaagaaccggcgatggaactatataataaggtaaaggcggcaggttgcgccactgtcacgaaagccgagcgcaaggagaagacggaggaaactcccttgctctacgacctgaccacgctccagaaagaagccaacgccaagcacggcttcacggcggaacagacgcttgaaatcgcgcagaaactctacgaaaagaagttgataacctatccgagaacgggaagccgctacatccccgaagacgtgtttgccgaaattcccaaactgctcgctttcatcggcacacagcccgaatggaaagacaaggtgcgggcaaaagccgccccgacacgccgcagcgtggacgacggcaaggtgacagaccaccatgccctgctcgtcacgggtgagaaaccgctcttcctctccaaagaggacaataccatctatcagatgattgccgggcgcatggtcgaggcattctctgagaaatgcgtcaaggatgtgaccactgtcacggcggaatgtgccggagtggagtttaccgtaaaaggcagcgtcgtgaagcaaaccggatggcgtgccgtctatggcgaggaaaaagaggaaattaccatccccggctggcaggaaggcgacacgctgacaccgaaaggctcgtccattaccgaaggaaagaccaaacccaagccgctgcataccgaagccaccctgctctcggcaatggaaacggcgggcaaggaaattgaggacgacgcactgcggcaggcgatgaaggactgtggcatcggtactcccgccacacgcgcctccatcatcgaaacgcttttcaagcgcggttacatggaacgctgcaagaagtcgcttgttcccaccgaaaaaggacttgccctcaattccgtcgtcaagacgatgcgcatcgccgatgttgccatgacgggcgaatgggaaaaggagctggcgcgtatcgagcgcggggaactgtccgacgacaccttccgcaaggagatagaggcgtacacacgtgagataacctccgaactgatctcgtgcgacaagctcttcggcagccgtgactccggctgcgcgtgtcccaagtgtggcacgggcaggatgcggttctacggcaaggtggtacgctgcgacaacacggagtgcggactgcccgtgttccggctgaaagcgggacgcaccctgtccgacgatgaaatcaaagacctgctcaccgaagggcataccaagctgctcaaagggttcaagagcaaacagggcaagagtttcgatgctgttgtcgcctttgacggggaatataacacgacttttgtgttcccggaggctaaaaaggacaagaaattttcaggacggaagaaatagtattaactttgccacttgttcagagtaatgaattgttcttcgataccggattacactcatactttggatttagtggtggcactcggagggataccgagtgcctttttcttcctttttccaaccgattatcccgttaattatcaatccgctaaatccaaagtaatgaacaacaagaagaaaaacgagggtcagaccgacttttcctattacggtctgtacctgctggactatctccgcacgaacaagtttgaacaggctgacgacaccgctttcatacgggaacgggccgaccgtgccgccgaaacgtatgagagggcacggcttgaaggctatcccgccgatggtgcgcaggaactggcgatggacacgctgctgcgcgggctgcattattcccgttacgccatcctccgcgaagtcgtggaaaacgagtttgccgatgaagtgccggaagagaagcgtgaagcctttgtcctgaaactgctgccgcttgtcggcaacgtgttctccgtctatgacctctcggatgacaatttcgccctgtcttccgattacgacctgctctacacggagctgacgggagcaaccgtcctttacttagacgaatatggcgtttaaccgcaaacagaaactgcgggacaacatcgaggcgatacggacggcattcatccttgacagggaaaataggacagcgacaaccgaagagcgtgccatacttcaaaggtactgcggtttcggcggtctgaaatgtatcctcaaccctgcaaaggaactgacggatgccgtccggtgggcgaaatccgacctcgaactgttcgccccgacggtggagctgcacaggcttatccgtgagaacagcaaggacgaaacagagtacaagcggtttgtggattcgctgaaagcgtccgtgctgaccgctttctacacccccaaagagataaccgacaccatcgcggacgtgctggcagattacagcgtccgccccgcccgtatgctcgaaccgtcggcaggtgtcggcgtgttcgtggattccatgctgcggcacagccccaatgcggatgtgatggctttcgagaaggatctgctcacgggtacaatcttgaggcatctctatcccgaccagaaaatgcgcacctgcggttttgagaaaatcgaaagaccgttcaacaattatttcgacttggcggtgtccaacattccgttcggtgacattgccgtgttcgacgcggagtttcagcggagcgactctttcggcagacgctccgcccagaaaaccatccacaactatttctttctcaaaggactggatgccgtgcgtgacggcggtatcgtggcgttcatcacctcgcaaggggtattgaatagcaccaagacctccgtgcgtaacgagctgttcagtcaggccaatctggtatccgcgatacgcctgcccaacaacctgttcacggacaacgcgggcacggaggtgggcagtgacctgattgtcctgcaaaagaacctcagcaagaaggaaatgtcgcaggacgagcggctgatgaccgtgatacagacggacacgaaaaccgccctgaccgacaacgcctatttcatccaccacccggaacgcatcgtgcatacgatggcgaaacttgacacagacccctacgggaagcccgctatggtttatctgcacgagggcaaggcagcaggcatcgccggggatttgcgccgtatgctcgacgaggatttccattacaggcttgccatgcgcttgtattcgggttcaatccggcaggcaggaacggaagaaaaagttgccgttcaaaataaagtagagcgtcctgccataaaattggaaacagtatcctcggcgcagacggtggaaactccgacagaaaagccgcaacccgcagatgaaaagccggagatagaaccgcgcccgcaatattccgcaggcgtgcagctcaccctgcttgacctctgggggatgacggaagaggtcagccaaccgaaaacctccaaaaagaaaaagacggtgaaaaaggcagttacggcaaagtccactccgcccaaaccgaaagtcacggttacaccgacagctccaactgcaaaacccgcaatggagaataaggaggtgaaagcggagaacaccgccaagcctgccgacccggacgacatctatgccacactggactgggataccaatcctcccatcaacggtttctatgaaatgatgatgggtttgacgccggagcgtaggaaagaacttcgggaactggcaaggcagcataacgagaaacaagtggcggaaaagacggaagtgaaagccgtgccggaaacttcccgtgagcagccacgacaggaggaaacacagccggaggcagtcgccgcacctgccgttacagataccccatcggaagcggtggggactttccttttccccgacatcgaagcggaaaagccgaaggaggaagtcgtggacctttctccgcgtgcctaccaccgcacgccggagatgcacctgcgcgaagggtcgctggtggctgaccgggggcgtcataacatcggctacctgaaagacatcacgccatacggggcgacattccagccgctcgacctgaaaggataccagaaggaaaaggcgttgttgtatgtgtcgctgcgtgacgcctacgagcgtctgtaccgttatgaatcgctccggcgcgaggcaaatgttccgtggcgagagcatctgaatacctgttacgatgagtttgtcatgcgctacggcaacctcaacgccaagcagaacgtgaagttagtgatgatggatgcgggcgggcgcgacatcctttcgctggaacggatggaaaacggaaagttcgtcaaggcggacatcttcgagcatcctgtttccttcgcggtggagagccatgccaacgtaggctctcccgaagaagccctgtctgcgtcgctcaacaaatatggtacggtcaatctcgactatatgcgggagataaccgacagcacggcggaggatttgctcactgccctgcaagggcgcatctactacaatccgctcgtgaccggttacgaaatcaaagaccgtttcatcgccggaaatgtcatagagaaagcggaacgcatagaggcatggatgggtgacaatcccgaaaatgagcgtatgccggaggtgaagcaggcgttggaggctctgaaagatgccgagccgcagcgcatcgccttcgaggatctggacttcaatttcggggaacgctggattccgacgggtgtctatgccgcctacatgagccggctgttcgacacggaggtgaaaatcgcctattccgcaagcatggacgagttttcggtggtgtgcggctaccgcaccatgaaaatcacggacgagtttctggtgaaggggtattaccggaactatgacggtatgcacctcctaaaacacgccctgcacaacacctgccctgacatgatgaagtccatcggcaaggacgagcatggcaacgacatcaagatgcgcgacagcgagggaatacaactcgccaacgccaagattgacgagatacgaaacggcttctccgaatggctcgaagagcagtcgccgcagttcaaggagcggcttgtgacgatgtataaccgcaagttcaactgtttcgtgcgcccgcgctacgacggctcccatcagacctttcccgacctcaacctgaaagggctggcaagccggggtatcaagagcgtctatccctcacagatggattgcgtctggatgttgaaacagaacggcggcggaatttgcgaccacgaggtgggaaccggtaagacgctgataatgtgcatcgccgcgcatgagatgaagcgtctgaatttggcacacaagccgatgattatcgggctgaaagccaacgttgcggagattgcagccacctatcaggcggcatatcccaacgcacgtattctgtacgcttcggagaaggacttttcgaccgccaaccgtgtgcgcttcttcaataatataaagaacaacgactacgattgcgtcatcatgtcgcacgaccagttcggcaagataccgcagtcgccggaattgcagcagcgcatcctgcaagcagagcttgacacggtggaggaaaacctcgaagtgctacggcagcagggaaagaacgtgtcgcgggcgatgctgaaaggattggagaagcgcaagcacaaccttgaagcgaagctggagaaggtggaacacgccataaagtcacgcacggacgacgtggtggatttcaagcagatgggcatcgaccacatcttcatagatgagagccaccagttcaagaatctgactttcaacacgcgccacgaccgtgtggcgggattgggaaacagcgagggaagccagaaggcacttaacatgctctttgccatacgcaccatacaggagcgcacaggaaaagacttgggtgcgaccttcctctccggcacgactatcagcaactcactgactgaattgtacctgctgttcaagtacctgcgcccgaaggagctggaacggcaggacataaggtgtttcgacgcttgggcggcgatatttgccaagaagacgacggattttgaatttaacgtgacgaacaatgtggtccagaaggagcgtttccgctacttcatcaaagtgccggagcttgccgccttctataatgaaatcacggactaccgcacggcggaggatgtgggcgttgaccgtcctgccaagaacgagatactgcaccatataccgcccacgccggaacaggaggacttcatacagaaactgatgcagttcgccaagacgggcgatgccaccttgttgggcaggctgccgctttcggaaacggaagaaaaggcgaagatgctcatcgccacggactatgcccggaaaatggcactcgacatgcgcatgatagacccgaattacgaagatcatcccgacaacaaagcgagtcactgtgccaagatgatcgcggagtattatcaaaaatacgacgcccagaaaggcacgcagttcgttttctctgatttggggacataccagccgggcgacgggtggaacgtctattcggaaatcaagcgcaaactgacggaggactacggtataccgccaagcgaggtgcgcttcattcaggagtgcaagaccgacaaggcgcggaaggcggtgatagacgccatgaacgccgggacggtgcgtgtgctgttcggctctacctctatgctcggaacgggtgtgaacgcccagaaacggtgtgtggctatccatcatctcgatacgccgtggcgaccgtccgacttgcaacagcgtgacggacgcggagttagggcaggtaatgagattgccaaacatttcgccgggaacaacgtggatgtaatcatctacgcggtggagaagtcactggacagctacaagttcaacctcctgcactgcaagcagactttcataagccagctcaaaagcggtgcgatgggtgcgcgtaccatcgacgagggggcaatggacgaaaaatcgggcatgaatttctcggaatacatggcgttgctctccggcaataccgacctgttggacaaggcgaaactggaaaagcggatcgcatcgctcgaaggggaacgcaagtcgttcaacaagggcaagcgtgattcggagttcaagctggagtcaaagaccggcgagttgcgcaacaacacggctttcatagatgccatgacggaggactggaaccgcttcctgtcggtggtgcagaccgacaaggagggcaaccgccttaatataataaaggtggacggagtggattccgccgatgagaaggtcatcggaaagcgtttgcaggagatagccaagaatgccacgaccggagggttgtacacgcaggtcggtgaactttacggttttccgataaaggtggtgagcgaaaggatactcaaagagggattggagttcaccgacaaccgcttcgtggtcgaggggaactacaagtacacctacaacaacgggcatctggcgatggctgacccgttggccgccgcccgcaacttcctcaacgcgatggagaggataccctccatcatcgaccagtacaaggcgaagaacgaggtgctggagatggagataccgcagttacaggagatagcgggtaaggtgtggaagaaggaggacgagctgaagcagttgaagtccgaacttgccgcccttgaccgaaaaattcagctggagcttgcgccacccacgcccgaagtcgcagaaaaggagaatgaagggcaacagctcaagccggaagcggaagatgtgaggaacaggcaggcgcaatatcccgaaaatgcaccgccgcagatacgcagtccggcggatagtatcgttgccaaccatgtcataatcgggcgtccgggactgtatgccaaggaggaaacccggtccaaaggattgaaaatataacctaaggaattttatctgaagtattaataagggctatcccaaaaggtctaaaagtaaattttatcctttctgcaagtatctataggatggcaactgcatttttttctttttgggcagcccttattaaaatttattcttattttaggttatatacattcatgtccatttatgtaaaaaattcctgctgaccttgtttatgtcttgtcagtcaccatttgcaaaaccatatttgaccctcaaagaggctgaatttgataagtaacttgctacatactcataataaggagctaaatagaacacgaatgggaaatacacaaatgctaaactaaagaagatattggccaaaataaacgctataccgagagagaaacttgatttttcaacttcctaaaacggtgttgttcaaacatttctacttatttgtacttgccagttgaacctacgcttccctaataaaatgtctatggtaaaaagttaaaaaatcctcccacttttgttagatatatttttttgtgtaattttgtaatcgttatgcggcagtaataatatacatattaatacgagttagtaatcctgtagttctcatatgctacgaggaggtattaaaaggtgcgtttcgacaatgcatctactgtagtatattattgcttaatccaaatgaatattataaatttaggaattcttgctcacattgatgcaggaaaaacttccgtaaccgagaatctgctgtttgccagtggagcaacggaaaagtgcggccgtgtggataatggtgacaccataacggactctatggatatagagaaacgtagaggaattactgtccgggcttctacgacatctattatctggaatggagtgaaatgcaatatcattgacactccgggacacatggattttattgcggaagtggagcggacattcaaaatgcttgatggagcagtcctcatcttatccgcaaaggaaggcatacaagcgcagacaaagttgctgttcagtactttacaaaagctgcaaatcccgacaattatatttatcaataagattgaccgtgccggtgtgaatttggagcgtttgtatatggatataaaaacaaatctgtcgcaagatgtcctgtttatgcaaactgttgtcgatggatcggtttatccggtttgctcccaaacatatataaaggaagaatacaaagaatttgtatgcaaccatgacgacgatatattagaacgatatttggcggatagcgaaatttcaccggctgattattggaatacgataatcgctcttgtggcaaaagccaaagtctatccggtgctacatggatcagcaatgttcaatatcggtatcaatgagttgttggacgccatttcttcttttatacttcctccggcatcagtctcaaacagactttcagcttatctctataagatagagcatgaccccaaagggcataaaagaagttttcttaaaataattgacggaagtctgagacttcgagacgttgtaagaatcaacgattcggaaaaattcatcaagattaaaaatctaaagactatttatcagggcagagagataaatgttgatgaagtgggtgccaatgatatcgcgattgtagaagatatagaagattttcgaatcggagattatttaggtgctaaaccttgtttgattcaaggattatctcatcagcatcccgctctcaaatcctccgtccggccaaataagcccgaagagagaagcaaggtgatatccgctctgaatacattgtggattgaagacccgtctttgtccttttccataaactcatatagtgatgaattggaaatctcgttatatggtttgacccaaaaggaaatcatacagacattgctggaagaacgattttccgtaaaggtccattttgatgagatcaagactatctacaaagaacgacctataaaaaaggtcaataagattattcagatcgaagtaccacccaacccttactgggccacaatagggctgactcttgaccccttaccgttaggggcagggttgcaaatcgaaagtgacatctcctatggttatctgaaccattcttttcaaaatgccgtttttgaagggattcgtatgtcttgccaatctggtttacatggatgggaagtgacagatctgaaagtaacttttactcaagccgagtattatagcccggtaagtacacctgctgatttcagacagctgaccccttatgtcttcaggctggctttgcaacagtcaggtgtggacattctcgaaccgatgctctgttttgagttgcagataccccaagtagcgagttccaaagctattacagatttgcaaaaactgatgtctgagattgaagacatcagttgtaataatgagtggtgtcatattaaagggaaagttccattaaatacaagtaaagactatgcctcagaagtaagttcgtacactaagggcttaggcatttttatggttaagccatgtgggtatcaaataacaaaagacggttattctgataatatccgcatgaacgaaaaagataaacttttattcatgttccaaaaatcaatgtcattaaaataatggagcggtcaggaaatttctataaggcaatacggttgggatatatacttatctccattcttatcggatgtatggcatataatagcctctatgaatggcaggagatagaagcattagaacttggcaataaaaaaatagacgagctccgaaaagaaataaacaatatcaatattcaaatgataaaattttctctattgggtgaaacaatactggaatggaacgataaagatatcgagcattaccatgcacggcgtatggcaatggacagtatgctctgccgtttcaaggccacctatccagcagagcgcatcgatagtgtgcgcagtcttttagaggataaggaacgacagatgttccagatagtccggttaatggatgaacaacaatctattaacaagaagatagccaatcaaattccggttattgtacagaaaagtgtgcaggaacagtccaaaaagccaaaacgaaaaggtttcttaggcatattcggcaaaaaaaaggaagtaactccagcagtatcaaccactatccttcattcggtcaatagaaacgtaatcagcgaacagaaagtgcaggatcgccaattgtcggaacaagccgacagccttgcagctcgtaatgcagaacttaacagacaactgcaagaattgatttgccaaatagaagaaaaggtacaaaccgaactgcaaagccgggaaaacgaaatagttgccatgcgtgaaaagtcatttatgcaagtaggcggtttaatgggattcgttcttctattgttgttaatttcctacatcatcatacatcgtgatgcaaaaagcattaaacaatacaagcacaagacaactgatttgataaggcaactggaacaatccgtacaacggaacgaggcactgataacgtcaaggaagaaggcggtacatactatcacccatgaactgcgcacaccgctgacagcaataacaggctatgccggactgatacggaaagaacagtgtgaggataagtccgggcagtatatccaaaacatactgcaatcctccgaccgtatgcgggatatgcttaacactttgcttgacttcttccgcctggacaacggcaaggaacagccccgtctgtcaccctgccggatttcagcaatcacgcacacacttgaaacggagttcatgcctgttgccgtgaacaaagggctgtccttgtccgtgaagactggacacgatgccattgtattgaccgacaaagagcgaataatacaaatcgggaataacctgctgtcaaacgctgtcaagttcacagaagaaggcggtgtttctttgattactgaatatgataatggagttctgacactggtcgttgaagatacaggtacaggcatgacagaagaggaacagaaacaagcgttcggtgcgtttgaacgtctatcaaatgccgccgcaaaggagggtttcgggcttgggcttgccataatgcgtaatattgtgtcgatgcttggcggaacaatccgtttagacagcaagaaagggaaaggcagtcgtttcacagttgaaatttctatgcaggaagctgaagaacagcttggatatacaagcaatacacctgtttatcataacaataaattccatgatgttgtcgccattgacaatgatgaggtattacttctgatgctgaaagagatgtattcccaagaaggaatacactgcgacacttgcaccgatgctgcggcactgatggaaatgatacgccagaaagaatacagcctgttgctgacagacttgaatatgcccgatataaacggtttcgaattgctggaactgttgcgttcgtccaacgtgggcaattcaccaacaatcccggtggttgtggcaaccgcttcgggcagttgtaacaaaggggaactattggcaaaaggctttgccggatgcctgttcaaaccgttctccatatcggaactgatggaggtttccgacaggtgtgccataaaagcgacaccggacgggaaaccggacttttccgccttattgtcctatggcaatgaagccgtcatgctggaaaagttgataactgaaacagaaaaggaaatgcaggcggtacgggatgcagcaaaagaaaaagacctgcaaaagctggattccctgatccaccacctgcgcagttcgtgggaggtgctccgtgccgaccaaccgctgaatgtactttacggattgcttcgtggcgatgctctcccggatggtgaagcgttaagccatgccgtgactgccgtgctggataagggagtggaaataatacggttggcagaagaggaaaggagaaaatacgaagatgaataagacaaaaataattgtggtggaagacaacatcgtgtattgcgaatatgtctgcaatatgctgtcacgggagggctaccgcaatatgaaggcttaccacctctcaaccgcgaagaaacatctgcaacaggcaacagataatgatatcgtggttgccgacctgcgtctgcctgacggcagtggcatagaccttttgtgctggatgcgaaaggagggaaagatgcagcccttcatcattatgaccgactacgccgaagttaataccgccgtggaaagcatgaaactcggctcgatagactatattcccaaacagcttgtggaggataaacttgtccccctgatccgttccatactgaaagaacgtcaggcaggacaacgccgtatgcctatattcgcccgtgaaggttccgcctttcagaaaatcatgcaccgcataaggctggtagccgccaccgatatgagcgtgatgatatttggtgagaacggcacgggcaaggagcatattgcccacctgttgcatgacaagagcaaacgtgcaggcaagccatttgtggcggtggactgcggttcactctccaaagagcttgcaccgtcggctttcttcggacacgtcaaaggtgcatttacaggtgcggacaatgccaagaaaggatatttccatgaggcggaaggcggcacgttgtttctggacgaggtaggaaacctcgcgttggaaacccaacagatgttgctccgtgccatacaggagaggcggtatcgcccggtcggagacaaggcagaccggaatttcaatgtccgcatcatcgctgctaccaatgaagatttggaggtatcggtgaatgaaaagcgttttcggcaggatcttctgtaccgcctgcacgacttcgggataaccgttcctccgttgcgtgactgtcaagaagacattatgccgctggcagagttcttccgtgatatggcaaacagagagctggagtgtagcgtgagcgggttcagttccgaagcacgtaaagcgttgctgacacacgcatggccgggcaacgtgcgggaacttcggcagaaagttatgggtgctgtattgcaggcgcaggaaggtgttgtcatgaaagagcatctggaacttgccgtgacgaaaccgacctctactgtcagcttcgccttgcgcaatgacgcggaggataaggagcggatattgcgtgcgttgaaacaggcaaacggcaaccggagtgtcgccgcagaactgctcggcataggcaggacaacactatacagcaaacttgaagagtatggacttaaatataaattcaagcaatcatagcccgtaattcactgaatttggctatctttgcataacatttgagaaaaacggcgattggcaggagcttttcgccgccaacatataggataagaccgcaaggcgtttcaagcgaaaatctggtaaattggaactacggagacgattgcgtgatgcttatgctatgcttacgcatagcgtgcattcacgtactctccgtaaaggctttaccagagccatcgcttgaaggtagtgtgaattgcacgctacttttttacccttgcctaacgaaaggaaacgattatgggtaaagttcagattctcgccgtactgacgatggacggatgtctttcttcagagttatatgataaagcacatcaggatttgtgccttgaccgttgcggtcttgatgaaatcaggaagaaagccttttaccgtgtgacaccggactattccatttcaatgctgcacgaatggagaaaagactgcacaaacatccgttacctcgcggaagccacaccggacacggcagactatataaacggactgctgcggatgcacgctgtggatgaaatcatactatacaccgttcctttcatatccggaagcggacgacatttttttaagtcggctctgccagagcaacactggacgctttcctctttgaaaagctatcccaacggtgtatgtcgcattatctatatccttgataaaaaagcaagatagccaaaatgtgcggcaagcatacatttctattttcaggaatagaataaatgttccgattacaaacaatttaagtcggagataatttgtccttgtgaaaaaatactgaattttatacctctgaaatccagcactttgtaaaattgagtgttggattttttattttctgccgcgttttttgccaattatattcatgtgcgcacgcagaaaacaaagtgtaattttcaaaattgacagaaccatgaattatttcttgctggcggaaaccgactttttccgcctgataaacgaagccggcgactgcaatatggaaacggcatacacggctttcgccacccaagtgatcgaactgtgcaacggcggcatggacatgaaccttaccgtcatcgcgcttgcctacatcgaaatcgagttgcagcaccatcccgtacgtaatctgtcagaagaaaaaagagagattgccgcctacgtcagcaaggctctgtctttcgtaagaaagatgcagaaattccttgccacgccccaagtgccaccactaatatccgccaacaacgcaacagaaaccaccgccagccttcttcaatggacgggcaatgccatcgacctcgtggaacttatctacggcatagacgtgatgggctgcatcaacaacggcaatatgccgctcaaacagctcgccccacttctctataagatattcggggttgattctaaagactgctaccgcttctacactgatatcaaacgccggaagaacgaaagccgcacctatttcattgacaggatgcaggaaaaactgaacgagagaatgttgcgtgatgaggagttggagcggatgagaaaataaaaaaatatccattacatatgagaagacaggaatactcgtatcctgtctttttattttcatttaattatatattaattagcacaatatatgtgagtttttcattcctataaggacaaatttcagaaacgtatgtctggtaaattattgagtcatcatagtatgaacatatatcattactaaaaacaatgaaacaacttccataagattgtggttgtaaaaatcgccatttaatagcccgttttttttgtaaaattcgccaattaaaaaaatatgattatctttgcattatattttataaggtatggaaacagtaaatagaatacttcaagagaagattacagcacgaatcgcgcccaataaagcagtactgatttttggtgctcgccgtgttggtaaaacggtaatgatgcgtaaaattgtggacaactattcaggtaggacgatgatgctcaacggcgaagactacgacacattagcactattggagaatcgctcaatagccaattatcggcatttattggatggtattgatttgctggctattgatgaggcacagaacataccacaaatcggtagtattctgaagttgatagttgatgaaataccgggaataagtgtcttggcaagtggttcttcgtcattcgatttgctgaataagactggtgaaccgttggtcggccgcagtacgcaatttctccttacaccattctcgcaacgggaaatcgcacagacggaaacggcacttgaaacccgccagaacctcgaagcgcgcttgatttacggttcctatcccgaagtagtaatgatggagaactatgaacgtaaaacagactacctacgtgatattgtcggtgcatacctgcttaaagatatcttagcaattgacggcttaaaaaattcgagcaagatgcgcgatctactgcgattgatagcttttcagttgggcagcgaagtttcttacgaagagttaggtaaacaactcggcatgagcaagacgaccgttgaaaaatacctcgacctattggaaaaggtcttcgttatctatcgtctgggggcttattcgcgtaacctacgcaaggaggttacaaaagctggcaagtggtacttctacgacaacggcattcgcaatgccattatcggggctttctcaccgctggccattcggcaggatgtcggtgcgctgtgggagaactacatcatcggagagcggcgcaaagcgaacttcaatgagggactgcacagggagttctatttctggcgcacctacgacaaacaggaaatcgacctgattgaggagagtgccgacagtcttaccgccttggagttcaagtggggaaataaaatgccggccgcaccgaaagccttccaagaagcctatccctatgccgagtttcatgtggtaaatcgggagaattatttggagttcgtataatcaataaattacgtatatggaaacaaaactacaatccaaacagcaatatccgcggtttatccaaaataaaccgtgtggtattgacaaattcgatggaggttcgcaagaaaggttggcaaaaactattgctcgccatttttgtcagaatgattcattggatgaggaatgtactttacctcgaattatcggcatcgaaggtatttggggatctggaaaatccaacgtggttaaaatgttggaacgtgaattatcagacgactattacttttttgagtatgacgcatggggacatcaagaggacttgcaacgccgctctatattggaattgcttacaagcaaacttattgatgatggtatcctatctggaaatgcaacaataaaagtcaaaggtggaggtacgaaaaccgtatcatggtctgaaaagctgaaatatttattagcccgtaaaacggagaccgtaaccgaaaaatatccccttatcagtaatggtatggttgcggcatttttggttgcagttttaactccgatatttacatttattgcgtatgcagtaaaacctacacccacaacatggtggttttctttattgtctattatcatagctgcactgccagttcttattgcattgtgcgtttggaaatgggcatatagcaaagatcataaatatggatggagttatatgttagctatttatcaagataaagtcgaaaaggacgtttgctatgagactttgagcgaagacgaaccaacggtttacgagttcaaaacatggatgtaagacatttctgattttatcaaggaaaaaggacaacgtaaattagtccttgtttttgacaacatggatcgtctccccgctgaaaaagtaaaagaattatggtcttctatccatacgttcttcgccgatagcggttttgaaaatgtttgggctgttattcctttcgatgaaacacatttagcttgtgcattcggagatgagaccgacgaacaaacgaaacaactgaccaagtattttatcaataaaactttccctattgtttatcgtgttgctcctcctgttattaccgactatcgaagtatattcaacaaactgtttgttgaagcatttggagaaacagaaaatgaagcgaaagaaactataaatcggatattcagattggtaaatcctaatgccaatgttagggaaattatatcatatatcaatgagatggtcgctcttaaacaagagtggtgtaacgaaattttgatgataaacatagcattgttctgtttgaagaagacggatattctggcaaatccagtagaacaaatattgtccggcgactatctgaatggcattcaaacaataattaacaatgatctgcaaacacaacgcgaaattgcagctttggtatatggtgtcgatgttgaagatgctcgacaaattccattgaaaaaatatattgaaggctgcatcaacggagaagaagaccacgacataaatcaatatgcagagactaataaacaatttgacactgtattagaagaagttatacaatgtatggacaatgcgcttatcgataagattatacattgtttgcataaattaactcgaaagagcgatgttattctgcgtgtatggcaaagaatagcacaattgaaattaaaagaatccatagagaagcaggtgttccctgtcgaataccaagaactgctgttgcatttagacacggaaagccaaaaccatgtgattgctcaattatataagaagatagttcggttcaatgacttcaatggcggcgactatttcaaaacgttagatgcaatagacaggtttattgcgcaaaataagttggcgtgcgattttacgtcattgattgaagcaaaaacagtcaagccaaatacatttatcgattatattcaagctgcaaatgcaacagatgctgcctatcgggataacgcgacaactaaagcatataaatattatcaagtagcaacaaattcggaggcgctcgataattatttggcaaacttactacccgataatttcgaccatgcagatattgtaaaaacgttaaaagataattctacctatacgtttccaacgcttttgcaagcgatcacgaattgcattgatgaacagaatgtaaataaagataatataggggctatatttacaacctatcgtttattggcatctgacgaagaaagacctttacctgtaacgttagattcaacctacataaatcagttgcattctgaattagaaactgatggccgaaacattaaagagtctggatattacgatttagtcgccatgcaattggcacatggtcattccgtttccttaatagagggtggagatataaaatatgttgcagaactcatggactattatgtggatcatggagacttattagtaaatagtgtgggatggaatataccgctattaaatgaaacactacaatacatggtaaatcataaacttggctataaattattgctctcagacatattgccccaatttgaagatattaagaacagaataggtgtaacggatgaggtatttatcgagcatttagcagagtggaataccgatttggataagtatatcactaagaacaatattaaagatgtaattcctgacgcatctttttacgatttgaccactaaaataagcaatgtcctgaccgatcatatcaataaaatagcgttcgaagcgttgtctgaaataagtgttgatacattatacgcccaaagaacagcacatacatcatattattggtttgtcgcaataaaacatttactggctaaaatcaaatccttgccagataacttgactgaatttggcaaaaagattctgatggatattgcttctggaactcaaagtttgaatcctttccctaattgtttcaagaatatagttgaaagattggataaacgaaaaattaaatcgacagttaccgatataagaaatgatttctgcatcggtaaaaagactatcaatgcaataaagtttcaatttttcgaaacatggcttagatcgcatggtaatttgaaaagtcaagctggagacgttattgataaaatagtgaaacctgtaatttccgatggggcatgccgttcattgattctgcaaaacaaagatttttatatggatttaataaatacagcaggggatgatgcttatgaattgaaaaagagtctccgaaacctcatacaaaaagattcagatccgcaattggttaaatttgtcaattcgatagattcagtacctgaggttgaaaccgcgtaagtatttgtctaacaagtccgaattttacgattttacccgtcagaactgaagtgccccccaaaaaaattgtatccaacttttgggggtcacttcaaacttcgatagggataattttcaattttggggacttgttagacagtctcattatctggtagcagtttacacagcaccggatcgtttttgatacgctccagttcctcctgcacaatctgcttcacctcttccttgatgcgccggtagttcgcctgcaccgtttccttcatgcggtcgttgccgtcctcgtccgtgaagtttgtaatgacgggaattttcttgtaggcactttcttcccgtttcaccttttcggcatccaccacaatctcgcaatgaaaaatcttctgctcgatacgctcgttgaagttgtcggatacagaaccgacaaacattccctgcgtaagcccggaaatcttactcggtggaatgagcgcgtccatctgcgtgttgatggaggtggaaacatcctgccggttgatggagatggactgccgtttctgcaacaccttaccgaaccgctcggagagcgtcttggctgtttcccccaccacctgaccggagaaaatattgccgacagtgttcatcaccactttcgcctctttgtccccgtagtcacgcactaactggctgaaatcctgaaagcccagacacacggcaaccttgttgcttcgggcggtagctataagattgtccaaccctttgaagtatattgtgggcaactcgtcgatgatgaccgatgacttcagcatccccttcttgttgatgagcttcacgatacgggaattatacagaccgagtgccgcaccgtagatattctgacggtcgggattgttacccacgcagaggattttcggctcttcgggattgttgatgtccagcgtaaactcgctgtctgacatcacccagtagagctgcggtgaaatcatcctcgaaagcgggatttttgccgacgctatctgacccatgagctgctccgcagcccctccaagccacgcatccatgaacggcgaaaggtagttctccagctccggataagaggtcagtatcggaaatatatcctcgtaacggcggttcagaaactcgatagcatggggaaacgtgcaaaacttcccgttctgatagattttgagataccagataatactggcaaacagaatgataggtgactccacgaagaagtcgccctgcttttgcacccacgttttattgaggttgagcattattgtgtaggcactctcataggcatccgtaatatcttccataaaatccgggtgaatgggattgcaccgatgagagcgtcgcgggtcgtcgaagttgatcacatagaacttcggctttaccttgtagccgtccgggtggttcagcaaatggttgtaggcaatagtagataggtcgggatacttgaaatcgtagatgtattgactaaagcccttttcaatctgttgcttgataaaattgtttaccacggcataggacttgccgctgcccggcgtacccaacacgatggacgcacggaagggattaactacattgatccaaccgttgttccagcgtttcctgtaatagaaacgtgtcggcagattgaccgaatactcgctttcgataagcctcgtttcctgcatgaaactctcgttctcgttgttgaaaacatcctccatcaaattgtgtttcaacaggcggctcatccacagaccacccatcaacaggcagacatagcccgttccaatggtaaggacatacagtcccgtcaccgcttcaagcggcagcggcaggggcagcaaccaccagttcaggaaaaacagcacgaacccgacggcaaatgctgtccagattctcccccaagtgattttctcacccttgacacccttcgtacccagacaggacaaggcaagcaaaaggacggaaaacagcttcgtgtagagaatggaatggaacagccccgccgtgcggtcgaagttcagaaggattttgtccaccacgccgatgttcacgccccacagccggatggcttcgtagcagaaccagtacacgttcatgaccactaaaatgatactcacggcacgcagaaaatccatgattttcgccaatgccctcaaatcgtcttcttgttgtgacatacattgattttttaattgttgatactctgattacatacccaagcccttgcgttttttcttctttttgcgcttcatcgcccggatgaaagcctcttcctcggcatctaccgccggaccttcgggagtgagcaagcccataccgcccgatatatcttcactgtcgtaggcggtctgcccgtgtgccttgtccgcagcatccacagggatggatagcggtatcggcggttgtccggcgtatggcagggtgaagtgttcctgcaaggcattcgccgaaagctccttacccatgcgcgaaccgttcagcacgcatcccgtgcggtggtcgatgaaggtagccccatagatgcgcccttcctctgtgtagcgcagtacggtgtcgatgcccttctctttgagttgggatacaaatttgtccttgtcataagtgccttgcagcacggaaaggacggtgcgtttcgtcatgtctgccagtttcctatccttgatttccgatttggaacggacaaacttcttctgtacggcttcatagcctgcggacttcccgaaaagcgaggatttgaacgggttgcccaccttgttacccttgtcgtccgtgacggaatagaccagcccgtgatactcccgtccgcgcacgttgcccctcgcttcctccaccgtcatattatataaggaaaggagcgcacggtattcgcccatcgtctggaaacggtactgcccattcagagccttcacggtgttgcctacctgcttcttcacatcacctgccgatgcggccaccttgcgcaacggattatccaatctctgatttttacgttctgccggatgcaatccgtacttctgttccagttccctgcggatacggtcgctgcggcggtagagaaaatcccggttgagccttttcccgttctcgtccacgttgaccgtcacgatgtgcaggtggtggcggtcgatgtcctcgtgcttgaatacaagataaggctggtttccgaaaccgagtttttccagatactcgcgggcgatattctgcaactcaatatcggtcagcacatcctccgggtgcgggttgagagagatatgcaccaccggcttctcgatcttcatctgcggtggcaggaaggtgagaaaaccctccatcgccttgcctatgtccaccgttcccgaaccgtcattgtagatgcggttggtggtgagaagccgcccctgcgcctcgttaatcttctccccgttgtaggcaatcgcgccgtacaacgaacttcctacactgatttttgcgaccattttgcctccatttcccttgaaagttccacaatccggcggctcagtttcacgagttcgacggtgtgttgctctaatttgtagagcaacgccatcgcctttttctctgaaaaatgcagcctcagttccttcacgacttggttgtaattcgtacccacggcacggaattgtgcatgaaaatccgacagtttggtgtaatagtccaccaacgtcttgtccaccttcagcaccttgaacggttgcccgaagaagtgcgctttgaggaaaacagaccgtgcatagacacccgattttccgaacatggcgaggaaacggttgtgttcctcctcgttgaaacggacggtgtaccggtacaccgccggatcaagtttgggatttctccctgatttgcttttccttttctctttcatattactttggatttagcggattgacggcataagccgccgcttcggattacagcaccgcagttctgaaaggcttcccgacttcggagggaaagcccgccccctgcaagggcaagtgcttttcgtggctgctcaaaatattttgagcggctgaaaagacatcttgctatgttcaggtgaacataaaaatccgtcaggggacggattgggaaaatacctttcaggactccgggccgcgcgtcatcggcgaaccctgctgtccgggtgcaaagttacgcccttaaagcggtatcggacagatgcttgacccggtcaatgactgccaaccggcgcaacgtgccgccacttgccggagaagtgatacaggttccaaaatatacttgtttatttgcagcatgattcaagaaacgaacgatttgaagatatgataaacggaacattcaaatacccggaaatccgcttcttcggatacttgccgaaacggatacccgaaccgtcggaaacccggttctccgacaattcggtgacgtatggattcaatgacttcatgacgcaatgtcgtcaatcaccatttgtccgacgcaccgcttcaccacagaaccggatacgcgacgacccgcctgcgtgtgtagtcacggaagcggatggtgcgacagccaaatccgtatggaaacagaaaaacaaatcatcaacaattaaaataaatggaactatgagtaaggaaatcttcgttgcattcgcaacacagaaaggtggcatcggcaaatccactgtcacggcacttgccgccagctacctgcacaacgtgaaaggctacaatgtcgccgtcgtggactgcgacgacccgcagcacagcatccacgggctgcgcgaacacgaaatggggcttatcgacagcagcacctacttcaaggctctcgcttgcgaccatttccgccggatcaaaaagaacgcctacaccatcgtcaaaagcaatgcggtgaacgccctcgacgatgccgagaggatgattgccactgaggacgtgaaacccgacgtggtgttcttcgacatgcccggcacactccgaagcaacggcgtgataaagacgctctcgcagatggactacattttcactccgctgagtgccgaccgctttgtcgtggagagtaccctgaaattcgtcacgatgttccgcgacaggctgatgactaccggacaggcgaaaacaaaggggctgcatctgttctggacgatggtggacggcagggagaggaacgacttgtacggcatctacgaggaagtgatagccgaaatgggctttccggtactttccacccgcttgcccgacagcaagaagttccgccgtgacctttcggaagagcgcaagagcgttttccgctccaccatcttcccgatggacacggcactgctgaaagggagtggcatccgggagttttccgaagagataagcgacatcatcagaccgcagtgagcatgggcagcaggaaagtgaacacggaaggcatcgacgaggaactgctgttagcctccatcgggcggcgcacacaggacgggacactgcgccccgcacaggaagtacccgcagctgcaccgaccgaagaggacaccgccgcaccggaaccatctcctgtgcaacccgtaacacgggaaaaagcgcagagggaaagtggacgccggaaaaggcaggacgaggactacaacgagctattcctgcgccgcaacgagataaagacccgccaatgtgtctatatcagccgtgacgtccacggcaagatcctcagaatcgtgaacgacatcgccggaggggaaatctcagtaggcggatatgtggataccgtgctgcgccagcatctggaacagcacaaggagagaatcaacgaactgtacaagaaacaacgtgaagatctgatttgaaaatggaaaaagaaatgacaccgaatgaaaaaagaccacagcaagactgcggaggtatgtttacccaagtgcaggcgagtgtggaaatactgtcgcctgtcccggtaagcggcaaatgcagtgagaaggactatgaacgcctgttcatccgcgacccggaagtaaaggcacgtgaggggaagatggcgtatgtgcgcccggagtaccacgagcgtatcatgcgtatcacccgtgtaatcgggcatgaccggcttacgctgtccgcttacatcgaccatgtgctgacgcaccacttcaaccagtgcgaagatgcgataaagagcctttatgcccgaaattacaattcagtattctaaccaaaaacggaaggatatgaattacacaatcagcatgacagacattctgctggcggtatcggtcggctgcaacctctggttcctgttcctgctcctttacgagcgcatcatggacacgcggattgtccgcttcttcaagggcattgtcggattatggcggtcactggacgggaatgaggctaaacgcatagcggcacacgaggaagtccctgcggaaaaggcggacatcatcggcaagagccgtttcaggatggcatccacccggacaaccgctgccataccgacgcaagaagccgccactattgaaaaaggcattgagctgtcggaggaagaggctacttttgacgacggaaaaacgggaaacgcatcccgcccggcacaagtcccggaggaaaaactcgatgagaccttcacgagcataccgccggaggaactgggatacggggacgacgaaccggaagaggacgcctcggacacgccacgggcttcgggcagcagctttgacgagattgacgacgcctgcaagaccgccaaaaacccggacgcgacacaggcggaacgtgaaaaggcggctaaggtgttcaccgacatggagggcacggagttgtacgagaaaatgatggaaggctcttcggagataggcatccgcatcaaggggcttatcgagattcggctgaagaaatctgaaaaggagttcgtcgtgccggacaacatcgaggagttcgacattcgcaactatgtatgacaacaataaaagaaatgaacatgaaagaatgacatcaacccacgcggcgaggaaacgcaaggcgcatccccatccgcaacggacacgcccacgtccgtggaaacaaacgggcatccactaaaaccaaagtaaagaaacaaagtatcaaccgcccgacaaaggaccatccacccttttgacggcaaaaaacaagaacagtttatgaacaagaacatcttgaaaaacagaaaagcaatcctctccgcggcacttgtcatcgccgcaaccgcctccgctttcgcgcagggaaacggcatcgcgggcatcaacgaagccacctctatggtgagttcttatttcgaccccggaactaaactgatatacgccatcggtgcagtcgtcgggcttatcgggggcgtaaaagtgtacggcaagttttcatcgggcgaccccgacaccagcaagacagccgcctcgtggttcggcgcgtgcatcttcctgattgttgccgccaccatcctgcgctcattcttcctttaataaataatgtatggctgaatacccaatcaacaagggtatcggccgtccggtagagttcaagggcttgaaggcacagtacctcttcatcttctgcggaggtctgctggctctcttcgtcctgttcgtcatcctctacatggtcggtatcgaccagtggatatgtatcggcttcggcgcggcatcgtcctccctccttgtatggcagaccttcgcgctgaacgcccggtacggtgaacacgggctgatgaaattaggagcggcacggagccatccccgataccttatcaaccggcggcggataacccgtctgttcaaacgacaacgaaaggaagaaagacaatgaggaatacatcgaaaatgacaacactggaaaacaggttcccacttttagcggtggagcatggctgcatcatctcaaaggacgccgacatcacggtggctttcgaggtggaactaccggaactttacaccgtgacgggtgcggagtacgaggcgatacacagttgctggtgcaaggctatcaaggtgctgccggactactccgtcgtccacaaacaggactggttcatcaaggaacgctacaaaccggagcttcagaaggacgacatgagctttttaagccgctctttcgagcgtcacttcaacgagcgtccgtacctgaaacacacctgctacctctacctgaccaagacaacaaaggagcgtaaccggatgcagagcaatttcagcacgctgtgccggggacatatcatcccgaaggagctggacagggaaaccacgaccaagttcttggaagcctgcgaacagttcgagcgcatcatgaacgacagcgggcttgtcaggctgcgccgcctctccaccgatgagattgtgggtactgagggaaagacgggacttattgaacgctacttctcgctcatgccggaaggtgacaccaccttgcaggacatcgagctttcggcaagggagatgcgcatcggcgacaaccgcctgtgtctgcacaccctctccgacgcggaagacctgccgggcaaggtggctaccgacacccgttacgagaagctctccaccgaccggagtgactgccgactgtcattcgcctccccggtggggcttctgctctcctgcaaccatatctacaaccagtatgtgctgatagacaacagtgaggaaaccttgcagaagttcgagaagtccgcccgtaacatgcagtcgctatctcgctattcaaggagcaacagcatcaaccgcgagtggatagaccaatacctgaacgaagcccattcctacggactgacctcggtacgggcacacttcaacgtcatggcgtggagcgacgatgcggaggaactgaagcatatcaagaacgacgtgggcagccagttggcaagcatggaatgcgtgccgcgccacaacaccatcgactgcccgacactctactgggcggcgatacccggcaatgcggcggacttcccggcggaagagagtttccacaccttcatcgaacaggcggtgtgcctgttcacagaggaaaccaactaccgcagctcgctctcgcccttcggcatcaagatggtggacaggctcacgggaaaaccgctgcaccttgacatctccgacctgcccatgaagcgaggtatcacgaccaaccgcaacaagttcgtgctgggtccttcgggcagcggcaagtctttcttcatgaaccacctcgtgcgccaatattatgagcaaggcgcacatgtggtattggtggacacgggaaactcctatcagggcttgtgcggcatgatccgacgcaagacaggcggagcggacggtgtgtatttcacctacacggaagataagcccatcagcttcaacccgttctacaccgacgattacatcttcgacgtggagaagaaggacagcatcaagaccctgttgctgacgctctggaagtcggaggacgacaaggtgacaaagacggagagcggcgagctgggcagtgccgtgagtgcctatattgagcgcatccaatccgaccgtagcatcgtgccgtcgttcaacaccttctacgagtatatgcgtgacgactaccgcaaggaactggcacagcgtgacatcaaggtggagaagtccgacttcaacatcgacaacatgctcaccaccatgcggcagtattaccggggcgggcgttacgatttcctgctcaactccacggagaacatcgacctgctcggcaagcggttcatcgtcttcgagatagattcgattaaagaaaaccgcgaactgttccccgtcgtgaccatcatcatcatggaagccttcatcaacaagatgcggcggctgaaaggcgtgcggaaacagcttatcgtggaagaggcttggaaggccctctcatcggcgaacatggctgaatatctgcgctatatgtataagacggtcagaaaatattacggcgaggcaatcgtggtgacgcaggaggtggacgacattatcagttctccggtggtcaaagagagcattatcaacaactcggattgtaaaatcctgcttgaccaaaggaaatatatgaacaagttcgaccagatacaggcgttgctcggactgacggaaaaggagaagtcgcagatactctccatcaacatggcgaacaacccttcacggctctacaaggaggtgtggataggcttgggcggcacgcagtcggcggtctatgccacggaggtcagcgcggaagagtatctggcgtacaccaccgaggaaacggaaaaagtggaggtttaccgtctggcggagaagctgggcgacgacatcgaagccgccatccggcagcttgccgaaaggcggagaaacaaggaataactaaaaaacagaatgtatcaaccaaaaaagaaaaacgcgtatgaatttaccaaaagtgaaaatgctgcaagtcagcaagtgccttatcggattggcggtcatgatgctgcaatcctgcgacgtggccgacaaccgccgcgacatgctgtgcgggaactgggagagcgtggagggaaaacctgacgtgcttatctacaaggagggcgaagcctacaaagtgacggtgttccgtcgtagcggtctgcgccgcaagctcaagccggaaacctatctcttgcaggaggagaacggcaacctgttcatgaacaccggcttccgcatcgacgtgtcctacaacgaggccacggatgtgctgactttctcgccaaacggggactatgtgcgggtgaagccgcagccgggacatccgaccgaagaataacaaccactaaaatccaaagtaacatgagaacaagaataacaatgattatctgcctgtgcctgcttttcgcgggcagggcaagcgcacagtgggtcgtaagcgatccgggcaatctagcgcagggcatcatcaatgcctccaaaaacatcatccatacctccaagaccgccacgaacatggtgagcaactttcaggagacggtgaaaatctatcagcagggcaagaagtattacgatgccctcaaatcggtgaacaatctggtcaaggacgcccgcaaggtgcagcagaccatcctgatggtgggcgacatcacagacatctatgtgaacagtttccaacggatgctccgtgacgggaatttcagacccgaagagctttccgcaatcgctttcggctacacgaaactgctggaggaaagcaacgaagtgttgacggaactcaggaacgtggtgaacatcaccacgctctccatgaccgacaaggagcgcatggacgtggtggaacgctgccactcgaagatgaagcgttaccgcaacctcgtgagctactacacgaacaagaacatctccgtgagttacctgcgtgcgaaaaagaagaacgacctcgaccgcatcatggggctgtacgggaacatgaacgaaagatactggtagcctatgaagttcgacaaccttcatcagattttacgttcactttatgagcagatgatgccgctgtgtggggacatggctggtgtggcgaaaggcatcgccgggctgggtgcgctgttctacgtcgcctaccgggtatggcagtcgctggcgagagctgaaccgatagacgtattcccgatgctccgtccttttgccatcggtctgtgcatcatgttcttcccgactgtggtgctgggcacgataaacagcatcctctcacccgtcgtacagggcacggcaaagatgctggaggcggaaacgctggacatgaaccgataccgggagcagaaggacaaactggaatacgaggcgatggtacgcaaccccgaaaccgcctacctcgtgtccaacgaggaatttgacaagcaactggaggaactcggctggtcgccctccgacatggtgacgatggcgggaatgtatatcgaccggggaatgtacaacatgaagaagagcatccgcgacttcttccgcgagatactcgaactgctgttccaagccgccgccctcgtgatagacaccgtccgcaccttctttctcgtggtgctggcgattctcggtccgatagccttcgccctgtcggtatgggacggtttccaaaacacgctcacgcagtggatatgccgctatatacaggtctatctgtggctaccggtatcggacatgttcagcaccatactggcgaagatacaggttctgatgctgcaaaacgacatcgagcggatgcaggcagacccgaacttctcgctggattcgagcgacggggtgtatatcgtattcctctgcatcggcatcatcggctactttaccattcccaccgttgcgggctggattatccaagccggaggcatgggcggttacggtcgcaacgtgaaccagatggcgggacgagccggaagcatggcgggcagcgtggcgggtgcagccgcaggaaacgcagtcggacgtgtcggcaaattgctgaaataatcaatgtgcaatcataaattggaaaatataaatggaattcaaatcacttagaaacatcgaatcgtcgttcaggcagatacgcctgttcggtatcgtcttcctctcgctgtgcgccgtggtgacggtgtggagcgtgtggaactcctaccgtttcgcagagaagcaacgggagaaaatctatgtgctggacaacggcaagagcctgatgctcgccttgtctcaggatttgtcgcagaaccgcccggcggaggcacgggaacatgtgcgccgtttccacgagatgttcttcacgctatcacctgaaaaaagcgcgattgaacacaacgtgaaacgtgccttgctgctggcggacaagagcgtgtaccactattattcggacttcgcggagaaggggtactacaaccgcatcatcgccgggaacatcaaccaagtgctgaaggtggacagcgtggtgtgcgacttcaacgcctatccctaccgtgccgtgacctacgccacacagaaaatcatccggcagagcaacgtcaccgagcgcagcctcgtgaccacctgccgcctgctgaacgcatcgcggtcggatgacaacccgaacggttttaccatcgagggtttcaccatcattgagaacaaggatttacagactatcaaacggtaacaggacatgaaaagtatcagaaaatcaatgtggggcatgtattggaaactccacgacaaacggaaacgcttggcggcaagtctcaaagggtatctggacggcttgccgccggaaacacgccgccgcatcgtgctggggatgttcgccgccttcgcggtgcttgccctttacaccttcggcagagccgtctatgacatcggcaggaacgacggctcacatatggaaacgggacacgccggacgggtggaactgccgaccccggcggaaacaggcaatcacttaacaccttatttatatggaacagacaaagaatgaaccgacgaaagagaacaaagctgctcccgaaacggggaaaccgaaaaaggagcgcgaaccgctgacagaggcgcaacggctgaaacggcagaagatgatcgtgctgcccgctatggtgttggtgttcatcggggcgatgtggctgatattcgccccgtcctccggcaaggagcaaccgccgggaacggacggatacaacaccgagatgcccgacgctgacaaggcgaaccggcagattatcggcgacaagctgaaagcctacgagcatggggagatggaagagcgtcaggagagccgcaaccgtgccatcgggcagctgggcgacatgttcgaccgcgagatagcgggaacggagaacggagtggacttcgacctcgccaatccgggcggcaaggaagaaagggcaaagccagccacgccgcagaccatccagtcctccgcagccgcctaccgtgacctgaacgccacgctcggaaacttctacgaccagccgaaaaacgacaatgcggagatggacgaattgttggagcgcatcgcatcgctggagtcggaactggaaagcgagaggggcaaggcttcctctatggacgagcaggtggctcttatggagaagtcctacgagctggcggcaaagtacatgggcggtcagaacggaggacagccatcggcggaacagagggcagagccaactaccgtgcagaaagggaagaagaacaaggcaatgcctatcagacaggtggagcatcaagtagtttcttcactctcacagcctatgagtaacgcggagtttgtcgccgccttatcgcaggaacgcaaccggggtttcaacacggctgtcggcacggcggaggtattggacaggaacaccataccggcgtgcgtgcatggggcgcagagcgtgacggacgggcagacggtaaggctgcgcctgctggagcctatggcggtggcaggcaggacaataccccggggtgcggtggtggtcggcacgggcaagatacagggtgagcggctcgacatcgagattacctcgctggaatacgacggcacgattatccccgtggagcttgcggtctatgacacggacggacagcccggcatcttcatcccgaactcgatggagatgaacgccgtccgggaggtcgccgccaacatgggcggctcgctgggaagcagcatcaacatctccaccaatgccggggcgcagctcgcctccgacttgggcaaggggctgatacaaggcacgagccagtacatcgccaaaaagatgcgaaccgtcaaggtgcatctgaaagccgggtacagggtcatgctttaccaagaaaaatattgaaaacaataaaaattaccactaaaatccaaaagtaatgagaaaagtaatcatcatgtttgccctcgctatgggcatcataactgccaacgcgcaggagaatgtaaccgttgaaacgaccaacggaagtgaacaaccgaccttgacgaaggaggtctatccgcagaaggaggcggacggcgacctatatcacgggctgtcacgcaagctgaccttcgaccgcatgataccgccgcacggtctggaagtgacctacgacaagaccgtccacgtcatttttccggcggaggtgcgctatgtcgatttaggctcgcccgacctgattgccgggaaagccgacggagcggagaacatcatccgtgtgaaggctaccgtaaggaattttcccaacgaaacgaatatgtccgtcatcacggaggacggcagtttctacaccttcaacgtgaagtacgccgccgaaccgctgttgctcaacgtggagatgtgcgacttcatccatgacggcagcacggtgaaccgcccgaacaacgcgcaggaaatctatctgaaagagctgggcagcgaaagcccgatgctggtgcgccttatcatgaagtccatccacaaacagaacaagcgcgaggtgaagcatatcggctgcaagcgtttcggcatccaatacctgttgaaaggcatctacacgcacaacggcttgctttatttccacacggagataaagaaccagagcaacgtgcctttcgatgtggactacatcacttggaaaatcgtggacaagaaggttgcgaagcgtactgccgtgcaggagcagattattctgccgctccgcgcgcagaactacgccaccctcgtgccgggcaaaaagagcgagcgcacggtcttcacgatggcgaagttcaccatccccgatgacaagtgcctcgtggtggaattgaacgagaagaacggcggccgtcaccagtccttcgtgattgagaacgaggatttggtacgcgcgggtaccatcaacgaacttcaagtacgctgaccatgagaaagtacatcgcaataatcatcgcgtcgcttgccctttttacagggcaggcgcacgcccagcggtgtctgccgaagatgcagggcatcgaggtgagggcggacatggcggacggcttcaatctcggcggcaaggacggcgggtacagcttcggggcggctctctccacctacacgaagaaggggaacaagtgggtgttcggtggcgaatacctgttgaagaacaatccctacaaggacaccaagatacccgtggcgcagttcacggcggagggcggctattacttcaagatactgtcggacgcccgaaagattgttttcgtctatgccggggcttcggctctcgccggatatgaggcggtaaattgggggaagaaggtgctgcatgacggctccacgctgcacgaccgggacgccttcatctacggcggtgcgctgacgctcgatgtggagtgttacgtggcagaccgtatcgccctgcttgccaacctgcgggagcgttgcctttggggtggcgacacacggaagttccacacgcagttcggggtcggtatcaagttcatcatcaactgacacgggcatggaaaggacggaaatagatgctgtcagaaggatgccgcttgcggattttctcgcacggctggggcatgagcctgtcagaaggagcggtaacgagctgtggtatcttgccccgtacaggggcgagcgcacatcctctttccgtgtgaacgtggcgaaacagctctggtacgacttcggtttgggcaagggcggcgacatcttcacgcttgccggggagtttctgcaaagcgatgacttcatgaagcaagcgaagttcatagcggaagccgccaatatgacggttgccggatgggaaaagcccgtctatctctcgaagccgaccgaatccgtttttgaggatgtggaggtcgctccgctgctccgctcactgctgacggagtatttagaggaacggggcatcccttacgccatcgcatcccgtcactgctgccgcttgaactacggtgtgcgtgggaaacggtattttgccgttggctttccgaacatggcaggtggctatgaagtcagaagccgatatttcaagggttgcatacctccgaagtctgtatcactggtaaaggcgaatgacatcccggctgacgagtgcctcgtgttcgagggcttcatggactttctctctgccgtgacgcttggtgtaaccggtaacgctgactgtcttgtgctgaactcagtcgccaacgtggagaaggcggcgggattgctggacggatacgggcgcatcggctgcttcctcgaccgtgacgaagccggacggcggacgcttgccgcacttaccatgcgatacggggaacgtgtcaccgaccgttcctccctctatgacggttgcaaggacttgaacgagtacctgcaactgacaacgaaaaaacagaaaaacaaccatctaaaaatcgaagaacaatgaacatactgaacaacagaaacaagagaacatcaatattcaaggcagtggcgttatgcctgatagccgccatgtcattcaccctcgtgtcatgtgacgatgacatggacatccagcagtcctatcccttcacggtggaggtcatgcccgtgccgaacaaggtagtaaaggggcagacagtggaaatccgctgtgaactgaaaaaggagggcgacttttcgggtacgctctataccatccgctatttccagttcgagggggaaggctcgctcaaaatggataacggcatcaccttcctgcctaacgaccgctacctgctggagaacgaaaaattccgcctgtactacacggcggcgggtgatgaggcgcataatttcatcgtggtggtggaggataactttagcaactcctacgaactggaatttgacttcaacaacaggaatgtaaaggacgacgatcttaccatcgttcccatcggcaacttcagccccttgttgaaatgatgcgtgtattcatgacaatgctctgttcacttctgacggtctgttctgtgtccgcgcagatcagccgccaagagggaacggacgggcaggcggcaatctaccgactgccgcttatggaacgtgcttttttatgctgccgctactttgaaggctggcactcagaaaaacactacccatacgtcggttggggtcacaaacttttgccaaacgagaagtattcggcacgaaccatgacaaaacgggatgcggatgaacttttgcggaaagacctgcgcaaatttgtcgccatgttccgtaaattcggggttgattcgattttgcttggcacgttagcttacaatgtgggaccggcgaagctgttaggcagcaaaacaatccccaaaagcaccttaatcaagaagctggaagctggtgacaggaacatctaccgtgagtatatagccttctgcaactacaaaggaaaacgccacgccatgctgctcaaacggagaaaggcggagtttgcgctgttgtatatcccataaaaggactgacaaaactggcaaaagacgtgccatatttaacttggcacgtcttttgctctatcacttgatagattatcgtaggattttctcgttaattgacatcgttgagccatttttgcctatcggtttccaaataacacttcaagttgtaagtgttgtgagagcaatacaaaacatagttattaaccataaaaagtatagcgaaattatgaagaaagtatttaggaaaattcagaaaggaacaacaaaaatgattgaacgtatcaaatcgttgggggaaatggagacgaagcagaaatgtgtagttcaacggttcgagattatcattcccctccaccaaaaaataacgacccaatatatagcctccgcaagttttacttgcggattttttagttatcgcagattggacaaaggtttctttgctactttctttgtccgccatcatgctcactgaaagaaagtagggcggctctcgccgccccgccactcaaaagcgtgtgtaaagtcccgtcaccatcgtgaacatttcctccagcatatcaaaatagataccctcgtgtacggcaatgtcctttgtcttgcactcaaaggtctttttgctgaacgtcctgcggtagaagcgcatattgtagaggtctgccccttcgtcatagatgatgtcaaggcggttggcacttgttttgttccttgcaaggctcatccgtaagccgttgcccatatctatgaaatcacggctacctgtcatggcggtgaagcgttttccgcctatctgctgtaatatcgtcttggctatcatatcttttgtttttagggttttaagtattggcggtgcgaacaccgccatcccgttcaaaattctcgcatttcggaaatgggggtctgccgttgtagccactctttcacacattccatattgtactcgctcgtgatgactgccgtatggctgtcggtggcggtgaaacgtgtgctttcgtaatcatctatccaccccttgagggtgtccgttccccacgctccggtatcgtcaaagataccgtccaatgccgtgataggttcgctgaacttgactatcagcgtttgataggtcgtgttcatagtctgtcctcctttcccttctttgcgttcagccacttgtcccgtgcggctcggcactcgtccaacgtgggtttgacacaagagaacaattctctgtctatggggtggcggtagtcgtactgcacaagtgtccgcctgcgtcttccgatacccgattggaaacgctcgtatttctccgtacctgcttccgcgcaggtgcttactccgttgatggtcattcgtgttgtcataatgttgctttttagatggttaaaaatgtactgacagaactctgttcttcatcaccatttcggggttgcttgtgtagcgttggtgcaggtagaaatggtgtgagccgaagccgtaaaggaaaaacttgtcaagttcgtgcttctcggcaaactcctttacgctctttctcaattccccctcactcgttgtgagagtgaggaggttcacaaattcaaggaacatcgtggggattgcatcatcccacacacaaatcatactttcaattcttacttccatatcaatgttgttttaggggttatgctatgccgctttcatccgctcacggataaggttggcgttcttgttcacaaggtctatgatgcgctcgtgatattcggtgtcctggttgtgcttgccgtggcactgcaccacttcgagggttcgcaagtccacctctacggtttcaataatctcatcgccaatccttgccgatagtatgagggtgtcggctttcttgtagtatccactgccaaacacgcagatgccctgcgtcttgccctcgttgtaatactcgtctatgctttcaagcaccttgacgattatttcctcgtccgtgattaccaagccgaagaatttggatttgttggcgatgaaatcctccgcatctttctttcgttggagttgtcgctgttgctcacgctcacgcctttcaatctcccaacggcgttgctctgcggctctttccttctcgtgtatggcttcaatttttcgggttgcgttgtcgtgtgccgccatgaaatcttcgggacagatgttcttcgggttacggaggtcttgaccgagttttttgagcatacgcagatagtcgcaccacattgagaggttgtctatctgatacttgtgacgcttggcaatcagatatgatgcccaacattcatcggcagtacgggtattgaaaagaaagtgtttcatgacctcaatctcaccgcctttcataagggtttcaattcttgggtctgaaagcaaggctttgaaaagacgcacgggggagatgccgtggaaatcgcccttgaagccgttacgtctgagttggggcaatatcctcatctttggatatgcacagcttcttgccaccacatcatcgtataggctgttgtgcggtcttacctccatatcgctgcctaatgcccacacatcgcaatagcagaaaaggaagccacggagcaacgccatgtccgtaaccttgccgtcgggtgaaatccaacgctgcacgacctcgtggcagtagaaacgcatcggttcgcctttcctgctctcgcatctgacctgcgccacgcggattacctgataccctttgcaggtggttatcacgctgaaattctgcgtttccttgtagatgcgtctgcgtgtgtcctgcactttgagttcggcatggcatttggggcaggtgcagccttcaagggtgtcgcatagtccgctgtcgctgtgccactcgtgaccgcagtcggaacaggtgatgttccctttcttggtgcggtagccgatatgctcaacgcagtggcggtatgcccaatctatttgtgtcgctgatatggggcgaaggttggcggaaagtcttgccacctctttctgtatcttggtcttcggtttcataagcctaaatcaaataatgagggttggggttggttttcttttctcgctgacggtctgtggcggttctgcaacttgcggagttcctcctcttggtatttgcggacagcgttctgacgtgcctccgccttttcctctgccgtgagtttcacaacgtggttcacaaccacttggcagtccatcggtttgcccacctctatctcgttttcctcatagtagtggatggcttgcccgaatatctctccgtccgtgaaaccgttgcaaccgcttttctgcacatagttcagaatgtgggtcacgcactcgtccatgttcttggcagggttgcggtacttctttgcaaatagcgcatcttcctccgcacgctgttccaagtacatatatatcgttctcttgaaatggtctgttcctttcatatcgctgtcatttttagattatctgtttcagtatctctctccaataggtcggctctacctcgctgagaaggaagtccatgaaatccctccgtgcgtccttgttcagttcgtggtacaatcttcggaaagtttcaaaattgccgttgatgtacgtttccaccatatacacgaagatgttgtccacctcgtaatatctgcactgctgcgctgccgtcttgctgtttctttttgccatgtcggtaagggttaaagggtgaataaccaaaggatgaagccaaagaaggcaatggtggaaaggatagccacgattacacctatcgccactcggaacactccgtttacaatctctctgatgatgccccaaaggatgccgaacaccccgaaggcggtgcgcatcatcaagccgcatatcgccaacccgatgtgttgcgccatttgtctgaaatttgccgttgccgtcatatcttcgctgtttttgatttttttgtttttaatgcggattcaagagctgagggagttgagtttcaaactatcttatctgcctctcgtttatccgacattttttttatgcgtctttctgtcgcatcggtcgttttcgtttcgggtgcttgaaaaggtagggattagggaatgcaaggtttttcggtcaaaatactacccgcagggctggagatttttaccgaaaacaggaggcttgaccttgctttcccgtccaatcccggaattacctttgcgcccagaacgaaaatgactgactgatgcggcttactgaaaggcgcaaaatggaggtaaacgaaaacagaggcagattgtgtagaaaaaaacttcaggggaaaatccgtaaaaaaaagaatcaccaaaaggaaaaagacatcaccggaagcgtgaaaagggcaaaccacaacaaaggaagtatgattgtttccgatccgacggaacttgttcagccgggtggcaacaatcattcttcccggtttgtccggctgtgtgtgggcgcctgtttcattcatggggcaggctgacacactctgcattcactttccgcttccggcaaaagagacagcgaaaaaagaaaaatcatttgaaaacccgtaaaagcacctcttggcataggcgcaaaagaaaggggcattgcttcatctgtctaaacatcgtttaggcgtgaggcaatgcccttttctccagctatgcggtagtcggcacacgtttgttccaaactcgttttgggcaatggtgtgccgacggacaataccgcttttacggaaaattcttatgaatgaggggataaaaaacgggagtttatatcaaaatctcgaattaaatagctacttttgcatacgaagagttctttgaaggttacgcaacgcgcagaaggataatgcagtagataactaactaaatcgtaacctattactatcaagagcaattaacctacgctcatttccaataaattacactcttttcgtaacttccagatgcaaaaatacgatattcttttatcaatgccaataactcggtgtttaaatatggcttatctcacgcaaagatatcgctccgcagaatataaccgataacatctcccttacgtacggtagcgccttgctgtgcacatatctccaccacacgtccggtaaatccggttagaatcttttcatattccccccacggagtggaaagataacaaaagacttcgtcatgctgatatttacgcccgatgaatggagcaatggatggtccctctacggaaacttcccaaagtacctgtccgttatcaggggcaataaccggatctgccttggcacgtttcaacttcttaatttcctcttccgaatacccgttctttgccattgccgcatccttagcatgttgcaactcttcctcaaaacgctttttggcaaccccggacttataatcacgatactggcgatcgtgcatagccagttcaaaaagttcttcgtcatcctctccatattcccagccattttcatccatttcctttcgatattcatccaaagcatccggataattcaactgcgggtcggtatcgacaaattcatatcctttagatttcgccaactctataatctccggtgcaagcgtaccaggaagacgtccacttttacccagaatcatatcccaagtatggttatctatcattgtccaacgttcttccccttttacctgctgcataagattcattaatgcaacatttttcacatactggctgaaaggagtcaccaaaggaggataacccagcttgggccatacatattccacttcatcaaaaagcatcacaagcagatcatccagactaagttccggctcattcttactccttaatatcatattgatgccggaatgtacccctttcaagtctgccatcatggaccccatcataccacccggcaaaccacatttcagtagaagcgaagacatatatttattggtaggatccataaaataacccagaaaatcatcaatgaattcttgcgtcatcgcacgagctttcatatatgctttcatatttatgtcgggaacctggaagcctaaatctttcaacatagcttgcacagagattacgtccggatgcactttgccccaagacatcggttccatagccacatcaatgatgtccgcaccattttcacaaacctcaaggatagaagccatagacaatcccggtccgctatgaccatgatattgaatcaatatatccggatgtttctccttgatggtcctgaccaattctcctaacatacccggacgaccgatacctgccatatctttcaaacatatttcaggtgcaccggcctcaatcagtcgatctgcaattcgggcataatactcaacggtatgcaccggagaatacgtgatacaaagagttgcctgcggaatcatacctgcttccaaagcatatttaatagaaggaatgatgtttctcgtctcattcagtccacagaagatacgggtgatatccactccttgcgcatgcttgactttatacatcagtttacgcacatctgccggaaccgggtacatgcgcaacgcattcaatccgcgatcgagcatatgcgtttgaatacccgcttctttaaaaggcgcagtaaaagcacggacggctttattaggattttcgccgtacaacagattcacttgttcaaaagcaccaccgtttgtttcaactctagcaaaacaactcatctcaataatcaaaggagcaatacggacaagctgatcaacccgaggttgatatttaccggaagattgccacatgtcccgataaacaagactgaatttaatttcctttttcatcatagccaataataagtgattttttcttcggttaacttcacatatacaaatataagggtttaaactgacatatagtcaaacaatcaccttaaaaaatagatataaagagatgtttaatatcataatgcaagaaaaccaccccctatatagatccattcactataaataacaaatcaaattgttttatgttcgtacatatatcattcctttaagatcgccaaatacttcatcgacttcattcaaggtataaacaaaccaagataaccatcaggcataatccacttgtcaagagctttattatactcaaaattactattacaataattaatataagatgcaatattgactgaatcattaaaataaagatttcatcattttttattgttattactctagtaaataatggtattagtgagaacctaaaattgtaaagcgcaaatacacagcaacatacaagtatatatttcacgagcccttcgaaatacaatgaaacatattcaagaaggcttgcatttctctccattatttaccataaatgtactatattttatccattagaagtgcgtcgtgtccgataacagtgaaaatcagtgaaagaatttaaaagagaaacaaatacaacagaattatttggaaagaatcagttgaacatttacatttgtcatgtgatttttttcatagtattagatttaaggttaacaaaggttggagcaaggcgttgctcctttttttatgtccatatgtgagattagttcatgcgagttaattcaataactggtacattcctcctgccaatacacgaatcacccctttcatttccagttcaaaaagaatagcggtcatcttatttacaggaatatctgcttctactacaagagaattgatttgcagatttcccagtttctccaaaatagcgacaattttttgttcctcttcagacagttcaataaaaagactacgctgcacacttaccttttctgaaagagtcgtctgcatattccagcccatagcctgcacaaaatcttcggcagataataacagggatgctttattatccctaatcaaccgattgcatccttttgaatattcatcacccatgcgaccggggaaagcgaaacaatcgcgatgataaccttcagcaagttcggctgtaatcaatgaacctcccttttctgccgactcaatgacgatggtagcatcacacataccggcaacaatacggtttcgactgataaaattatggcgatcaggattcgttccggacagaaattcggtcagtaatccccctttttcaagcatatcaacagctgttttccgatggacatgaggataaatacgatccagcccatgagctaaaacacctactgtaggtaattcattagccaaagcttcacgatgcgcatgaatatcgattccataagcaagtccgctgactacaagtacatcaggacaaagcgccttcagatcccgcagaaaagaggcgcagatttgtgtcccataatcagtagcattacgggttcctaccatattcaggatatgaagggaatttagatcggcatttcctttaaagaaaaggacgacaggggcatcttcacattcccgcaaacgggaaggataagcttcatcataaaaggacagacaggagatacgattcttccggataaattcatattcttgctcggcgcgaaacacagcttgcggacaatccaatgcctctatcacccgttgacttacttctggaatacgttcctgtatttctttgcgcagacggaagacatcaacggcattacccattccatctatcaaatgttttgctcctatgtgcccgataccgggcaccattgtcagagcaatactataaatttgttcttcttcggagctgttcatttcaggtagggagcaaagacgttatcgaacaattcgctgtcacttaaacgtccgtttaccacacataccgtctcaacagtggatttcactactactttattatcattcttacggaagatatcctgataaaacacatatttgataccttcctttttcatatatagtttcgagacaaactcatctccgcttttcaatggagtcttgaatgccatactaatacgtgccactaccggatcgactccctgctcatgaagtgcagcaaaactgacacccaccgaagtcagaaactcgtgacgggtatgttccagatagtgctgataattggcattattgacaataccttgaaggtcacattcgtaatcgcgaaccttcatttccaattcatagatatagttcatttaaattgagaattaaaagttgagaaataacagttagcctcttttttgctcaatatcgagccctttgaacttcttcaattcttcggtcgataccagtttatacagcttgtcactgggacgtatcttatccgatttcatggagaaatgctgtcccttcttcactgtttgcacagattccaagtcaacacgggcttcttccaaagtcataaatagtgcaccggtagtcggccctgtaatgagaagcttatcgcctacacttacttcagcagcttctaccaggaattcggaaactccgatattggaaaagtatttgatacctttacctacataaatcttacgttccgtagctgccgaaccataattcctggtccattcgcccaaacgctgtcccaagtaatatccatcccagaagccacggttgaatacggttttcaggcgttcatcccaagccgcaatcttttcatcggtgaatgttccatccaaataagccttgatagcttctttgtaacattcaaccaccgtacgtacatattcaggtccacgggcacggccttcaatcttgaatacacgtacaccagcatccaacattttattcataaaatggatggtcttcaagtctttcggtgacatgatatattcgttatcaatatccagctccacatccgtttccttatcacgaaccgtgtaagaacggcgacatacctgcatacaagcaccgcgattggccgaatgattcatctcatgtaaagagagatagcatttacccgatactgccatacaaagcgcaccatggcagaacatctcgatacgaagttgttcgccgctcggaccacagatatgttcttcctgtatctgacgataaatctcggccacctgttccagattcaactcacgagccaatactaccacatctgcaaattgtgcgtagaattttaaagcctctgcattggagatattcaactgggtagaaagatgcacctcctgtcctatctgacgggcataattcatcactgccacatcagctgcaatcaccgcagaaattcccgcttccttggctgcatcgacaatagtatgcatcagaggaatatctttatcatagataatcgtattgaccgtcaggtaactcttcatcccgtgctcatcacacgtactagctatttcccgcaaatcatcaatcgtgaatgtattagccgaacgggcacgcatattcaggttttctataccgaaatagatagaatcggcacctgcctgaatggccgcagcaagagattcgcgcgaccccacaggagccattatttcaaaatcttttatattcattttactgtctgataatcattaaatatgatagaagtatgcaaaggtacgaatttatccgtatttttgcagagaataaagcagaaagaagaaatggaaaataagaaacctatcgtactcaacaatctggaagagtgggattttaccgactatatagactcgttgatacaaaaagaggaggctgtagatttggaattcaaggttgccaaagatggtcttcctaatagcttatgggatacttattcttcttttgccaatacggatgggggagtcattgtgcttggtgtgaaagagcataaacagcaattcattatagaaggactgactaaagaacaaatcagccaatacaaaaaagacttctggaatcaaattaataatccggattgcgtaaatgagaatctgctttccgacaatgacttatacgaaggtcgctataaagaaagaaatctgcttctcatctatgttccccgtgcaaaccgtgggcagcgccctatctacaggacaagaaaccctttcggtgggcatacatttaaacgcaaccatgaaggagattataagtgtacggatgcagaagtcagacgcatgattgccgattcggacgaaagtcatccccgtgactctaggattctgcccaattactcgatggaagacattgataaggaaacattgattcaatacagacagctttttgccaatttgaaaccatctcatccatggcttaatttaaatgatattgaatttctgactaaacttgaagcatatcgcaaggacaggagtacgaaagtagaaggtttcacattggcaggcatactgatgtttggaaagacagaaagtattaccgatcccgaatgtgcgcccaattatttccccgactatagagagcatcttaacgaaaactccgatattcgatggacggatagaatctgtccggacggaacttgggaagccaatctctttcagttttatcgcaaggttcatcccaaactaactgctcccctgcctaagcctttccttatcagaaacggaatacgtattgatgagacacctacgcacattgctgtacgcgaagcttttatcaatacgcttatccactgtgatttctcggaggagggcaatattgttgtcgaacaatgggtagataagtaccgatttaaaaatcccggaacaatgctggtcagcaaagctcaatattatctaggaggagatagcgtctgccgcaataaagccttgcagaagatgtttatgctaatcgggttttccgaaaaagcgggaagcggagtaaataagatcattaaaggttggagggaagcaaactggcagaaaccgtatgttgaagaattcagccgaccggataaggtggaactaaccctgcctatgattagtttattgccggatgatgctgtaattaaactaaaggagttgtttgatggaaaggttgagaacttgacgcaagatgagttgacagccttagtaacttgttacagtgagggggggattaataatacccaactgcaatatgttattccgcaacaccgttctgatattacaaaaatgctgaaaaagctttgtgatcaaggattccttatttcagaaggaaacagaaggggaacaaaatatcatgtcaacgatccggagaggaaggttggaagcccgaagggaaaggttggaagctcggaggaaaaggttggaagctcgaaggaaaaggttggaagcccggaggaaaaggttggaagctcaaaaagactcaaattcgaagaacttcaatccataataatatccattgcagaagactacatcacattagatgaaatcgctaaaagaacaaacagaacctttgactatattgccaataaaataattccacgaatgctaaagaataggactatcgaatatttatatcccggagtacccaatcatccgaaacagaaatataaagcaaccaataagaaaacgaataataagcagtaatacttatatatgaagatagctcacatagatttgggtaaataccctatcctgctcgctcctatggaagacgtgactgatccggctttccgcctgatgtgcaagaagttcggagcagacatggtatacaccgagtttgtatcaagcgacgcactgatacgtgcagtcagcaaggccgcacaaaaactcagtatcagtgatgaagaacgccctgtcgctattcagatctacggaaaagatacggagacaatggtagaagcagccaaaattgtggaagaagcgcagcccgacattctggatatcaatttcggatgtcctgtgaaaagagtggccggaaaaggggcaggagcaggaatgttgcagaatattccgaaaatgctggagattacccgtgccgtagtagatgcagtaaagattcccgtaactgtgaaaacccgtttgggatgggacgccaataataagattatcgtagatttagcggaacagttacaagattgcggcattgccgcattgactattcatggccgtacccgtgcacaaatgtataccggagaagccgactggacactgataggtgaagtgaagaagaatccacggatgcatattcccattatcggcaatggtgacgtgactacgcctcaacgctgcaaagagtgctttgaccgctatggagtagatgcagtaatgatcgggcgtgccagcttcggacgtccgtggatattcaaggaagtgaaacactatctggaaaccggtgaagaactgccaccactcagtttcggctggtgcatggatgtactacgccaggaggtggtcgacagtgtcaatctgctggacgaacgcagaggtatcctgcacgtacgccgtcatctggccgccagccccctattcaaaggaatttccaatttccgcaacacacgcattgccatgctacgggcggaaactaaggaggagctctttcggatatttgatgagatacttgctactatttaaacatcggctgtgcaaaccactttttaaacatccaggttgccactacatacaataagaatgcggagaaaaatcctaccacagcgtcgatgacgtaatgtgcttgaatatatacggtagccccacagagcaacaaatagaaaggcagtaaacaggcgaacagcttcttactgccgcgccaagccataatcatcaagatagtagaaataccgacatgtgaacttgggaaagcagctgtgggacgttcacccacttgctgggaactttctaccaggctataaaagaatccgtgctggtatcccggtccgggcaacaactcctgatgataattgaaatagtcaccgatggcaggaaaaactcccttagccacattatcaaatccgatagccggaaaatagaactgagggcctgccacagggataaagatataaagcaaataatatataaagaaagaagtaaccagtacaaaggacatcttttcgaaccattcgaacctataaatgaaataaaacaacgccacaatcagcatcatcggataatagaagaaatatcccatattaaacgcttcgctgaccaaaatatgaggaaacgtatggcagaaccagatagcaggttgtccactgaagataaactgttcgatggtagcaaagacatggtccaggttcggaaaaaagcgattgaattcaaaagtatccggataccaataagaaagcaggctcatctgaatgacgatacgcacaaacgccgagaacttacaaggggcaagccgataaagatacatcaacaggaaagtcattgcagcaatcatggctctatccaataacatatgccatggatggtccatcctctgaaacaggaatagaatcaatatggaagttagcagattataaatcaatgtaatcttctccacagcaaacaaccctttccgggtctctacacgcttaaataagtctaaagccatccttcgtttttataccaggcaatggtttcacgtacccccctctccaaatcgtatccgggggtatatcccaattcgttaattgtcggggttatatcacactgccagttgcgttgtttcattatcttatatttatcagaattcaatgtactgcacttcttggaacgcgtagcaacaaattcagcgagcaaagatataacttttagcacaattaacggacatttcagatgaagaacaaacggattccctaattctttttgtatcaagtccgaaaacgcacggcttttatagactttcccatctgtcagaaaatacgcctttcgggtgactcttttctctatacccaagaaaatagcctgcacaatgtctttcacatagacaaaagtcagatcttgccgcttgaaaccaaccgaaaaatcaaaatgcttctgaatggacttagccattaggaaataatctgattcacgaggtccatacactcccgtagggcgataaatgacataaggaaaaccgggaatactttgaatatataattcagccttcaacttactgaaaccataagccgtgttgggcatgggagaatcgtcctcttttatcggagtgtaatctgtctcgcgcacaggaccgaacacactaagcgtacttatatatataaattgcttcgggaccatattcaactccctcaacgtatcaataaaatactttgtctgaagatagttcacgtagtcgaaagattttttgtcgaaacatttcgtaacaccggcacaatgaacgatataatcaaacttattatatgtccctttatgaccggagagttgggcacgaagttcattaggatgtgcaaagtccagttccaaaaagtgtattttccgattcttcaaatattgtctgctactggtaggacgaactcccgcccacacactaaactttcgtttcaacgcttcttctacaatgaaactcccgataaaaccgcttgcacccgtaattaaaatactctccattcctacttttcggctctatataaatacaattaaaatttcggttacaaagatacgataaatataatagtattattaccgttttttttatttactttgtagccatatcaatagatgatgaccaataaaaatacatattatggcgaaaaagaaagaaaagaaagagaaaaaggccggtaagagaatgagtaaaaaagagctggcagcgttgttaatagactttttccacgccaaatccaatgaagttctaagtatgaaatacattttctcggaattgcgtcttaccacccatccgcagaaaatgctatgcatcgatatattacatgaccttttggatgacgattatatctccgaaattgagaagggcaagttccgtctgaataatcacggcacagaaatgataggtaccttccaacgcaaaagcaatggaaagaattcctttattcccgaagaaggaggtgaaccggtattcatagcagagcgcaattccgcccatgccatgaacaatgacaaggtaaaaattacattttatgccaaacgaaagaacagggaagcagaaggggaagtaatcgaaatactggaacgtgccaacgacacttttgtcggtacattggaagtagccaagtcatacgcatttctggtaacggaaaaccgtacacttgccaatgacatatttattccgaaagataaactgaaaggcggaaaaaccggagataaagcgatcgtgaaaataacagagtggcctgacaaggcaaagaatcccatcggacaagtgatagacatattgggcaaagcaggcgacaataccactgagatgcacgccattctcgcagaattcggcttaccatacgtatacccgaaagcagtagagacagcagccgataagattccggcagaaatcactcccgaagagatagccaagcgtgaagacttccgcaaggtgacaactttcactatcgacccgaaagatgctaaggacttcgacgatgcgctttccatccgctccatcaaaaacggattgtgggaagtaggcgtacacatcgccgatgtgacacactatgtaaaagaaggaggaatcatcgacaaagaagctgaaaagcgtgccacttccgtttatctggtagaccgcaccatcccaatgctccccgaacggttgtgcaacttcatctgttcgctccgtccgaacgaagagaaactcgctttctccgtgattttcgatattaccgagaaaggagaaatcaaagactcacgcattgcgcatacagtcatcaattccgaccgccgtttcacttacgaagaggctcagcagattattgaaactaaagaaggtgactacaaagaagaagtacttatgctggacaccatcgcgaaagcactccgcgaaaaacggttcgcagcgggagcaatcaattttgaccgctacgaggtgaaattcgaaattgacgagaaagggaaacctatcagtgtgtatttcaaagagtcgaaagacgccaataaactggtagaagaatttatgcttcttgccaacaaaaccgtagcagagaagataggccgtgtacccaaaaacaaaaagcctaaagtactgccctaccgtatccacgatctgccggatccggagaaactggagaatctgtcacaattcatcgctcgcttcggctacaaggtacgtacaagcggaacaaaaacagatatttcaaaatccattaaccatttgttggatgatatacatggaaagaaggaagagaatctgattgagaccgtgtctatccgtgctatgcaaaaagcccgttattctacacataacatcggtcactacgggctggcattcgattattatactcatttcacctcacccatccgccgtttcccggacatgatggttcaccgtctagtaacgaagtatatggatggagggcgcagtgtatccgaggccaaatacgaggatctttgtgatcacagctcaaatatggaacaaattgcagccaacgccgaacgtgcttccatcaaatacaaacaagtggaattcatgagcgaacgtctgggacagatttacgatggtgtcatctccggagtaaccgagtggggactgtatgtcgaacttaacgagaataaatgcgaaggtctcgtccctgtccgtgacttggatgacgattattatgaatttgacgaaaagaactattgccttcgtggacgccgcaagaacagaacatatagtttaggagatgccattaccgttcgtgtagcacgtgccaatctggaaaagaaacagctcgacttcgaattaattgagaaataaattatgaaaacttttattattgaagacaaacaacgaatcgagtccattatcctccattgcgatgcctgctttgtaggtatcacagatttagaaggtaatccctacgtagttccgatgaacttcggttatgagaatggcgtcctataccttcattcgggtcccgaaggcagcaagttggagatgttggaacataataataatgtatgcatcactttcagcatcggtcataaactcgtatatcagcacgagaaagtagcgtgcagttacagtatgcgttccgaaagcgccatgtgccgtggaaaagtgacattcatagaagatatggatgaaaaacgccgggtattggatattatcatgcgtcattacacggataatgaattcaattattccgaacctgccgtgcgcaatgtcaaagtatggcaagtgcccatcgaacagatgacgggaaaagtcttcggtttgcgagccaacgaaaagccatgaaacgtttcccggctctttacctgttgaccatcttccttctgttacctgcttttcccactctcgcacaatcagataagcaggtaaacagtcactcttttacctatcaataccttacaaccaaggaaggattaagcaaccagcgcgtattctccatcctcgaagataagaaaggcttcatctggatttctacacgttcaggggtagactgcttcaacggaagaaccgtaaaaaactacagccttttcggggaagacatcatcgttgacggagccgggcgcatgatctacctcacaaaagactcacacgaaacgctatgggcatatacaagtgccggtaaagtattcaaatatgatcccatctccgacgctttcacactggagattgacgtagcggaattaacggaaaaagggatcttttggacaacaatgaagttgaacggataaacaggtatatatcactggcaagacgacggctgacaattggctcccataccggagccaaaggagctgtgctgtaccgttcactagccataacatgccatagatgtggaataaacatatttgaatacttctgcgacattatagaccgttgtgccgcatggcctcttaatacccctatagaaaattatcgtgatttactttccgacagatggaaaaacgcaaagatagccgcccaaaaatatggacggctatctttttataggttatacgctatcgcggacggttgtaccaccggactcgccggataagcatcccttctttttagttgaccaggcggaacatcccgccgatcttctcacgcatcctgtccggagaaaccttgaattcgttcaccccccctgtatttctcgatcagctcgacggctatcgggagcagcttgacaacatagggtgccttggtcttcacatggtttccaaccagccaggtgttgccgtccgaatccgtgtggacattccggtaagaaagttctttcaggtcggcatgggccagaccgatgaagcacatgaaaacaaacatgtcccggatggcctgctgccgcctgtagctcagcttgactctgataacgcgttgcagatcctcctccgagaggaaaggacgtttcttatattccggcttgcaaacgaacttcttgaactaatctatactacaaatctcattgaaaacctgaacggaaaaatcagaaagtacacgaaatcaaagctttcattcccttcagataatgcagtcaaaaagactgtttatctttcacttatggagattgagaagaaatggacacagccgattcataactggggattgattatgaatcaatttatgcttatttttgaaaacagaatccagatataaggacaaacttacagctgaatcctgtttccatttacacaaaattttggacagtgtcgacgtttgtaaaaaaatgtaattccaactttaactcccatgtgtttgtaaaaaagagatattgcttttgtactgaagacttataaatgcaatgattactatttttttaaagaacggcatatgcgtttatttgtttcctgaatacgtttttcatctagtttgattactttacgatcataagtcatcaacccattcacttccatttcgacatcagttgtttgcgtataaacagcagcggagaaacctttggcaatcatatcataaagtatattggcatatttcacatattcatcggttacttctttggatgagttgaattgtatataaccccaattgtgattcggctcccaaatatgttctttcacaaccattccaatacctccatactcccctaacacagtagcacgttgtgcatcataaagatacatctcaggttgtggataattatgcaaatcaagcatatctccacaagtatagtgattaccgccactagcaggatttaccaaatgagaagggtcataattctttgtccattctacaatctcttgagttttaaactgcccccaagcttcattaaatggcacccaggttccgatacaaggataagaataaaggtaatccattatttctttccattctttacgaaagtgagtttcagattcaacactacgctttagctctgtaccttcaaaatattttctattttgccattctggattgcggtctccacttggcatatcctgccatacaatgatgcctaaacgatcacaatgtgtataccaacgagcaggttccaccttaatatgtttgcggatcatgttaaatccaaaatcctttgttttctgaatatcgtatactagtgcatcatcagtaggagctgtatacaaaccatcaggccaccagccttggtctaaaggaccaaactgaaatagggcctggttatttaactctaagcgaacaattccgctttcatctcgacgagtagaatatttgcgcatagcagcataactttctactttatcacatattttctgtccatttgtcaacgttactttcaaggtataaagaaaaggagaatccgggctccataatttaacgtcagtaggcatctctatttctacggattcaccattgatactttttcctactgctaccaatttatctccttcgtatacatctaccttcacataatcatctttatttgcagaaactaattcaggttgaactttcaatagattacaatccacatctggagtgatacgcaaattagaaatatgtttttctgctacgggttctaaccaaaccgtctgccaaataccgcttaccggtgaataccaaataccttcaggattacttacttgctttccacgcggttgtgtccctttatctgtaggatcccaaacttttacttttagtttatttttgcctttaagcaataaagcaggtgtaatatcaaaagaaaaaggagtaaatccaccggtatgatgtccaacttttacatcatttatccagacacttgtttcccaatctactgcaccaaaatgaagcagtatctttttatctttccaagcagaaggtatgtcgaattcacgtagataaaccaactcttgtttttcatcaattctcctgcaaactcctgataaagaggattctatagcaaatggaacaagaatttcaccatcaaatttatcaggaactctgtcccctttttgaataattgcatatttccatatgccattcagatttttccaatctttacgttccatgataggacgagggtattcaggcaatacttcattaggattcaccttatttgcccacttcgtcttaattcgatttcctataggtttccattgtgcctgtattccacaagtcatcaatgataatagtggtactaaaaaaagaattcgtttcatataatcaacacttcggtatataccaagactttaaaattaaacatagaacctgtttaagctagctcaataaacacataagagctcattgagctatgttgccaaaacaagtagttaaaacaacaggcattttacaagtataaatactgaagaaaacgtgctttaattttatctacaaccataagtaatgacaacttttttaatgagttaatatatttattaccaagtacacttatgcttgactaattataatgtagtattactattacttattgttttttctatttttaatatgctgacaataagcaaatattggtaaatttctcactgatagtcacgtcatatatcaaaacagtgtatactacaataattcaagtaactgtatcggattatctcaattaaataaaaaacgattgttatttcaaatatttcaaatctttaaaattgctcgtattctctacttccttaatactgatagcatatccaccacctggagctgccttcaactctaatttgctttttctattgacaaatcccttacgaatacaataagcttgaggattatggcgataatgtgcgtctttatcatcttgataaatagttgcaacatacttcttgtttggatctagaaaatcaaaattcaaagtagaaacatgtccctcctcaccacttgtacatccgacaaaccagttcgaggaaccttttgctttacgagcaacgacaatataacgtcctggttcagcttccaaatatttgctctcatcccaatctactgctacatctttaataaattggaatgcatcaataaaacggagataattcttgggaagatctgcagccatctgaagtgggctgtacatggtaacataaagtgctaattgacgcgccaatgttgaatttacatgagatttattattgggattaagtttactcatatccatttcaaaaatacctggagtatagtccatcggcccaccttgaagacgagtaaaaggcaacactgtagtatgaaaaggcttacttcctccaaatgcttcatattccgtacctcttgcagactcattaccaatcaaattgggataggtacgacacaatcctgtgggtcgcacagcttcatgtgcgttaaccataatcttatatttggctgcttctgtaactgcatacaaataatgattattcaaccactgtccgaaatgatgttcaccacgaggaataatatcaccgacgtacccactttttactgagttatacccatacttattcattaaagtataggcatttttcaaatggcgttcatagttacggacagaagaagatgtttcgtgatgcatcatcaatcgtactccttttgaatgtgcatattcattaagcattttaatatcgaaatcaggatatggtgttgtaaagtcaaatacataatctttagattttccaaaccaatcctcccagccaatattccatccttctactaacacttgatcgaatccatgttctgcggcaaaatcaatgtacttcttaacattttcattattggctggatgttgcccattaggttttacatgggcatagtttgtcttacccagtttgaccgaaggaacatcccatgtatatgcccaaggctttccgcctgcaatcatttcccaccaaacacctatgtattttattggcttaatccaagaagtatctgtatacttacatggttcattcaaatttaatatcagattagaagctaaaatatcacgtgcatcatcacttactataactgtacgccatggtgtatgacaaggagtttgcatatatgccatatttcctattgcgtcaggagtcaattgtgaagtgaatacaaagttcctatcattcagattcaaatgcatacaagagtaatccactaatgctgcttcatgaagattgatatacaaaccgtcatccgacttcatttgtagagaagtctgcacacttgttgatgaaataatagaatgagaaagtttagactctatcattttactcaacaaaccacggatttctgatagttttgattctgtataatcaaattcttgtgtatcataatcgcccggaatccaccaagcagtatgatcaccagacatagcaaactgagtacattcttcttttataacaaaataagaaaggtttggttgagaaggaaattcataacggaatcccactccatcatcatacacgcgaaaacgtatattgataaaacatgcatctgatgttttttccaattccaccaaaagttcattgtaatggttacggattatgcttgactctccccatacaggtttccaaatttcatcatacgttgatgtagaactctttttgagccgaaaatgattaaacaatgatttcccctccttaattttaaatcccaacgtacttggtttgataacctgaattcctttatattcaatctgataagtaggcataccttgttcactaagagtaaatttcagtgtaatgttgcccgatggagaagatatgctttccgctttaactaaaaatgtaacaaaggtaaaacaaatggctataaaatatttcatcataacaatctgagatttataatttatatagaaaaatagaacaaacggactgaacaaattagccaccagctaaagtcttactctatataaacggaattccataaaaaatcctttataaaaaacttattaaaactatttatgtgcaaaatcacgaattacataattcacaaaaagacttactgttgttcacgaacatacgtcctacgattcggtcctacaccttttacaataattttcttccaatgtttaggcagtgctgaaggcaactgtttgataccattgtctgttaagtctagaccacaaaaaccattaattaccatttgaagtagtccacctgcaccagtagtaaaataagggttcgttcccccagcaccttcagaaatcaccccgaaaggtggcagttgattgggacggaaactacgcacaaacaattcataggccttctccccatcacccaaacgggcatactgcagagccaatacagaataggacatagcaggtccgcttttgtctattttgggctcatagtagagtaaatctctctttatttcttcaggacgagtgatagctttcagtggatatgccaataagtttgcatctgcctgtttaataatctgaccatcatacccctcgtattcacgggtcacgccatcagaaaatttcggtatacgcaatccctttgctacggcattccaagagaccggagcttttatgccacaaagagcagcagctttggaagcatcttgtagagcgcacctagcagccgcatttgtaaacgcattgtcgtctaccccttcagcatattcatctgcacaaactacattgcaaattgagtaagaaccgtcttcattctgttccgcgcggctcactaagaactccgccacttgttccatcagtggaaatccgtcctcgcgcaaccatcggatatcacggctcatacaataataattccatgtagcaatagcaatatctgccgatatatggtgttcaaaaggacctgtcaaagcgaaagtagggcatgactcctcaccgacatcatcactttcccaaggaaacatggcacctctatagccataactaaatgcccgttgacaagccggttttaatcggtcggtacgatagtccatcatcgagcgtgctattccctgatttaggaaaagcataggaggaaacatccagaactccgtatcccaaaaaatgtgcccgttatacccctgggatgttaatccgaagggtggtatactcaaacgactacccgaacgagcactagaatataagtgataaagagcaaaacgcaccgcacgctgtgcttcgtcatcacctacaatttgaatatcacctttccacaactcattccattgttctagatgtaaatccatcagcctatctactccttctttggctccataaataacttctcggtcggattcattacaagggtctataaaatcacgttgcgaacagacggcacccagcaaagcaaaggaaaaatcttctcctgtttttaaatattttgtaaatatatttcttttattatcagactcttccaccttagtatcattctcaaaaatgaaagccgaggtagcagagacttgtaaatttctgtgtctagttaaagctgaagtacgcaatagttttagatgaagtccataatcctgtatacttttccgttgtattctaggctgtagatactcatcgggaacttcagccccattttccacagacaagtcgaccggtgctaaagctttcactttcacttgcaccaaaccagcataaggcatactgcgcaaggcacatatattataagatacttcaagtttatttgcatagacaaagcgagtttgatgtaaggcttctttcaaaaggatacactgctcccatccggatatatgtgttccatcgactacttgaccatccactttcacattcatactgaaaggattgatgccacgaatcagtctactgacctcatgaggagctcccgcatcaaatacgtggttcagtacaatctgcttgatggaaaaaggttctttccaaggtaaaataccgattcctccatttcctacagcagtaccataataagcatcatgatagtctgatgtctttatgttccacagcgaatcatgagcatgtacataagtaaatccacagactatccatattaaaagtaaaagtatattttttctcataactatattatttcaagaataaattaaaactaaacaaatcatcatatatcatccatttgtaaatgattgctacaggtttacgaaaaaacactgttctctattttataataaagcaaatattttcaatccctcattattgaacttatattcttttggggcataaatccatgttatacaaactttgtcataccaagcataaaaatcaagtacagaaaacaataaacattttcctgttatattttatgatactgctattaaacaaatatcttaagagtaaatattctacataaatattatgcaagaaggacaggtaaaagctattctgcaaaaaaagttttagactgtacatcccggctgtttgttcctaccataacttcaaaatcgcctgtttcataaatatattgtaaattcgaattatagaatttcaaatcctcttctgtgattacaaacctaacttcacgactttcccctttctttaagaaaatacgtttgaaatccttcagttcctttacaggacgaactacatcggcatagatatcatgcaaatataattgtacgacttcacagccatcataattacctttatttgtaacaataacagaaactgtcaatttttcacctttcttcaaaacattagaacttaataccatattgtcatattggaaatgggtataactcagtccatagccaaatggatataatggttcgttactatcttctaaataattacttgtataacgattaaacacgtttttgtccggatcgggacgacttgtattgtgactattataatataatgggagttgaccaacagaacgtggaaatgatgttgtcaattttccgcttggattcactttcccaaacagtacatcagcaatagcatctccagcttcacttcctccaaaccaaacatttagaatggaaggaatattaactgcttcctcagttaacactaaaggacgtcctgtgaacagaagtaatactaccggctttcctgttttcaccaatgctttcaacaggtcacgctgagcatctggaatttctagtgtggttcgtgaagcagattctccgctcatttccgaacattcacctaaggcagctacaataacatctgctcggtcggcagtctgcaaagcctctttcaataaagtttgattatctccacggtccaatgggcgcatgcctgtggctgtcttttcgcgattttcatcatagaagatattacttcctttagcatagaggacttcccctttattgccaataacagagcgcattccttccagtaatgtacgatgtttggaaggattacacatcatactccacattccgcacatattgttacgtgcattagccatcggaccaatcagtgctatttttcctttagcggaaatgggtaacaatgacttctcattttttagtaaaacaaatgtttcagatgcaatgctacgtgcaatagagcgatgctcagtagtataaagctgtttcgatgctcgtaaagtatcgcaatatttataagggttgtcaaacaggcctaatttatatttaacttccaacacacgacgacaagccgtattgatttgttcttcggtaacttctccactttgaagagactcttccaatgtattcagaaaaccaaacgataccatgtccatatccgttcctgcctgcagagaacgtacagatgcttcttttaaaggggcaatgccgtgcgaagacatttcggcaatagagttataatctgtaaccaacaatcccttgaatccccattcttttcgaagcaaatcagaaagcagccatttgttcgcagtggctggaattccatcgacaatattgaatgaactcatgacactacctactcctgcatctacagcagctttgtaaggagcaagatattcattatacattcgtaagcggctcatgtctactgtattgtaatcacgtccagattccgaagctccataaagtgcaaaatgtttcacacaggaaagaatttcatcgttctgttgcaaattctttccctgatatccccgtacataggctttcgccattaaagagccaagataaggatcttctccgcttccttccgcaatacgtccccaacgagcatcacgacaaatatctaccattggactgaatgtccaatttataccatctgcacttgcttctatagcagatatgcgagccattttttcgacagccaaggtatcccaactacacgagagagccaatggaatggggaaaattgtttcatagccatgaattacatcagcaccaacaagcaagggaattttcagcctgctctcttctacagccaagcgttgcaattcgtagattttgtctattcctttcacattaaaaaatccacctatttcctgtttacgaatcatttcgctaagttttccgtttttcacagttcctgttgtgatatcacctccggatggcagattcagctgacctattttttcgcgtaatgtcatgtgacccatcaaatcactgacaaatagattcatttgttcatcagtcacatcgatatgatgggtggtacatgcttctcccaacataccgataaagaatatcataagaaaattccaacatgttttcataatcagattgacatttattattattctataatagctgcaaaaccaccatttcttttcattgtaatagtaatggaagaagattttgtaacggtagacagtttgtgtctataatcagttgcttgacgattagaattaatgccgtcctcaaaactactcatttgataagaacgcccttcatttagaaaatcaaggggaattttaaatttcctctccatttctgcattattggttataccgccaataaaccacttattccctttgcgttttgctacaatgacatactctccaaccttagctttgagcgatttggtctgatcccatgttacagggacttgtgaaataaaacgggtgcaattctcattttttcgatagttgaccggattgtcagctaacatttgcaatccactctcaaaaagaatgaatgtagctaattggaaagctcgcgttcctacacctgcagaattgggacgttgagcactataaagttcaggctgcatgctaatcatggggcccggagtataatccattggacctacagcattacgcataaaaggaaggtatatactattatctggataacatcctctcatgtgttccaaacctttcactccttcataggaaacaacattcggatatttatactccaaacctgcaggagtaaaagaaccatgaaaatcaaccaaaagatgatgttttgctgcttctttagccacacgctcataaaaatttaccatccactggtcacttctgtccataaagtcgatttttatgcctttaataccccattcttcgtaagtcttgaacaaatcaaagttttgttcaacagccacccacgacagccataagattatgcctacgtttttatcttttccatactgaatcaactctggtaaacgcatttgtgaattgggtttattaggattaagtacggtttcagcccatcctgcatccattacaatatatggaatatgaaatgatgaagcaaaatctatataatatttataagtatcgtaattgcatcctgatacaaaattgacatctggaccataaagagctgcatcgtgccaccattcccaacttgccaaacctggcttaatccatgaattgtcttcaagaacacttttagtggctaatttgtaattcatcgtattttcaatgagttgagagtcttcgcttgtaattacaaaatagcgccatggataattccgatttccttcagtttgtgctatataatcagcctctttaataattttcatactcaaatctccctcttctgcaaattccaaaggcactttgggaaagactgcattcaatccgtttttaccgtttccttttaaaaacatacaaggataatcgaaacgatcagattcgccaactaatattttatattgcttgcgtgtatcaatcaatatgggaagcacagacattttgtccgtatccttccattcttgactggaaatatgtgtatactcttcttcataaggggttttaaaacttgaaggttgctgcaaatgaagcagatattctttaggaaaagaaatagcaaaatcttctccaagtacctcaaccttattagttttatgagtaataaaacgataagctaccccgtcattaaaagcacaaaattcgatggaatatcctttgaaatcaagtgtaagagtgttataacgactcataacagtagagaatttaagaggaacaactggccgcagttcttccgaaaaacttttacgtttctgccgcagtaatttcggattatctcctagaatttcgttattcaaaaataaacggagataattgtcctttaatagaatttcatcgttgtaataaatgtcgtagtaaatcttatcagatagacaaaattccacttttatagtcttgtttggtgagaacagactcgtttttttcttggcatatactgtggtagcaaatagtcctattaataataacaaataaaatttcttcatacgcatattttttatttttgtgagaatgatgataaaacgtgattatactcctcttcacttaaacgcaccatggctccgtgtcgggagtcgggaatattacaatcacaaacttcccatttttctgcctctatatgttccgcatcaaagcgtacatattcgtgcggatatctttcagagaaaatcatccatcccttattgtctggtttgggcatgaggataggagcttcgaaataagtatagggagtggtaacagggtgtttaggatttaccaaagaataaggccccgtcaaatatgacgatttagccaaccgaatagatttccccgtcggaataccatcttccggccaccgttcgtccttgataaccgcatagtagtttttaccaatttttcggattatgacatcaatggtagccatttcagaatcagctttacttggaaaatcgaacaaacgttttggtgatgaaaaagaactaaaatcttctgtcagcacataatatgtacgcatacttttccattcatcatttcctttgactccttttttggccgcatgccacgtaacaatatactgcttagaatcttcgtcataatacaatttaggtgcgccaaaccaattcctttcggtataataattatcggtaaggacaaaaggggatactggaagttccttctcaatactccacgctacaagatcgcttgaggtccaaagcaatggcttttgagctttttccgaaacgccaatcatataatatctgttatcatgaccttttataatatcgggatgtcctctgtattcagcattgacccgttgattattattcaattttgtccatgtacgtgcatctctacttatgtaatagtacatacgtccatagtcttcatgtcgcatatgtataaaaaggtatcctccttgaagttgggtactatgaggctgtcctcgaacattcgaaatacaaatgcatacaagacaaacatataaagaactaataagtaagtttctaattttcatgtaagtttattttagttagctaatgcaatatcatcttcccattgaggacggttgtagatttgactcaattgttttccgtacgatttagcttgttccaccaagtaattgggtagtggtatgtactggtgtgtaggcaatgtcccttttgctttgaaacatgcttgtgcatatttattaaagcggattaaatctatttttcgatgtccttcatatagaaattcctttgacctttcatctaatatgacatctagaaaagcctccttagttgcagtttgttgaacagacaaatcatctagtccgcttcttcttctcacttgattaactgcttctactgcctgtggagaaggtgcagcgttagattgtctcacttctacctctgccatcatcagcaacacatcagcccaacgagccaatggaaaatcgttcccttgaaaagtcgtgttggtctcgattgggtatttataaataatatatccgctccatctcttgttcaaatcttctttggttaccttttcagtaactataccttgattatttacccaatactcatctaatatcactgtacggcgtttatccttcgcttcataactgtcataaagtttcggtgaaacattgtatgcttgcatccatccacctccttgatagttgaaaggagtaggatttcctttgtcatccaccttggaggcatcgtttggtgtagcaagcatggatagagggaaaaaattaccattactaacgtctccgtttgccgaaggatcacagcttacagccataatgatttcgcagttgaaatcatttgcggccttaaacatatctacataaggattatccccctttgtaaacagactatatcgattatctttgctaagttcacgatacatctgcatcgctttttcataatagcctttcatgtgtgcaccttcattaagacaatgcttcatcatacagaatttagcataatctgacgtataacggccgtgttcctttactgcatcaggcagattttccatggcatattggaaatcattgtaaatccaggtagtcatatcatccagtgaaggtctgactaaattcgtcaaagcattttcattgttaatatcatctttgtcaacaattgcaggtaatggtccataaatgtgcatgaggtaataaagcataagacctctgcataaatgcgcctctcctaatagtcttttcttgctgacagttttgaagatttggtcgtcagccttctccaaagtagcaataatctcagtaaaacgagtaatctgggctagcttaggaatgtggtttatattatgctcacctacccatgaacgctctgcatatacacaatctctgtaatcagcctgtgatagtttcatccatgacccccaacctaagttccaggcagccatattatcagacggagcttcaaatacccttagaattccaccttcgggaatataaaaactatgctgtccaggatcgtttgctatttggtactgccatgttgtcgtaaaaggaatataacacgtcatagtgtaatcttcatattcactctctgtcgtaggatagttttccggattcaacgtcccgtaaagttttgggtcaaaattatcttcacagccgtatactgctattgatgtaataaaaaacagtatgaaggattttatatttttcatattcatagttattaatgttgattagaacgtaatgtttgttccaaatgagaatgtacgggtttgaggatattcacctctggaagcattgtttgctccaccaccaccggtatatatttctgggtcaaatcctttgaacttactgatgataaatggattttggacatccacataaagcttgatgcctcttacatatttttttagttttcccaaaagtttatccttgaaattgtatgataatgtcatgtttctcattctcacaaatgaggcattttccatgtctatattaacaccagcacctcctggcaacgcacccatgcgatcaattgccaatccgggacgagtaccattgggattggtttgagagttccaaagcagatatgcatattggttggtgttttccggataatctactgccaatggaccaggtaatgctgctctataagcaatattagatttgaggattccaaattgtccgtacataaagaaactgaactcccaattcttatagttaaatgtatttccgaaaccaatatagacatctggagtattatcttttaggtatatatcgctttcgtcgatttttccgtccttgtttttatcatcaataattgggcaacccggaagttgcgcttctgcctgtaacgatttttgtgattccggcatattgctgcgatcagcattgataataccattcatcttatagtaatagtaggcgttcataggttccttttctcttttttgataacagcgataatcataattcggtaatctttctttccaaaacgaattggttttcgagaaggttatctgcgtattccaggtaagttcccctacaatatttttagtatcaagcatgatttcccatccttgacgaaagtaatgacctccgtttatggggcgagtaggataaattgcgagaggagatgttgatgcatagcccaacaaactagttacatcattacggaacaaatctatgctaccacttaaccgatttttaaataaaaagaaatctaatccgatgttcttcataattgttttttgccaactaacgtcaggataatttgttcccattgacacacaaggcacataaaaaatactattgtcactgaatcccactttaaatccgctaggctcatacacaccgtaaagtgaactgcctaagttatcctgcccggttttaccatagctagctctcaattttaacaagttaacccaagaaacattcttgagaaagttctcatttgaaatcttccacgctgcagatacagatggaaacagggcatattttttccccgagaaaaacttatcagttccatcccggcgaagggttgccgaaacgacatacttatccaaaacatcaaaactgattttaaaaaactgagatcttttctcgtttttcaatgtgtgagaagttggatatatctttcctttagctgaactgatatcatgctcattaatcatgtcgtgtgtatcttcgtaagagattccatatccttcattactctctagatatttacccattccaaccattgcatccacttgtacgatattgaacatgtatttcgaaaatgacaacatagcttctattgtctgtgtttgcctgcgttgcgagaaaatatttccccttgacttatacatgcgggcaaaataaacatcggatggaataaatgttgatcttctgacattttcctgattcattccatacactcctttaaatacaagaatgtctttatacagtttcatgttgacagaaaaatttaaactgtatccattttctctactatagtccactatatcttccatcgctttgggattaggtatattccggaaaatagtgtaattcccatcatcctgctttactggcaaataagatggatacaagagtgctgaagtcaaaacactgggggcgacatctccttgatttccagtatcggtaccaattataccattattatatgaattttgatttgcattaaaaactgacgtcaaattcatgaaagggaacaaatccaaacttaaatttccatgaacagtatatttactcatatctgatttcgatacagtaccttgctgcttcatgtaacttcctcctagataatacttaaacttagagtatcctccactaatagtcagattatgtttggtaaggaaaccatggcgcagtactaaatccttccaatccgtattggtcgcattttgtatatccgcttcagaaaattgaggtttccattttccatcataaggagttgttccataaggatattgtttgttgttatatagataattttccctattgaaaacattagctaactccatatattctttcgaattgagcacatctaaataaggatagttgcgtacaaaagaatagctgccatcatacacgatactcggtaccccttctttaccttttttggtagtaatcaatattactccattatcagctccaatgccatagatagcagcagaagcatctttaagaatctccacagactccacatctgctggattcaaattggcaaggccattacggtcgatattattcggaagtcccacttgaccacaatttccactaatggcattattcggcataacaataccatctataacatagatcggatttcctcctccacgaattgaaatattcactctcccatcaggctgcatgctgttcactgtagcttgtaatccagccgctcgtcccatcagcaactggtttacatgactgactcctgcttgtgaaattttatctgttttcacttgtgcaatagcagttgtaagatttttcttcgataccgaaccgtaacctacgaccacaacttcatcaatgagttttatatcttcattcaagtatatttctaaaaacgatttgttttgtacatcaagaacttgagacacgtaaccgatataagaaataataatctttttatcaggtgaaacgttcatttcaaaatgaccattgatatcactgattgcaccaatttcttcccttcccaccgcaatgcttgctccaattattggttctccggttttactatctttaattatacctttcagctttttattatttgttttaacctcttttttagcgttcagaataatttgttttttcttgatttgatactgaatagacgttcctttcaacaaaatgttcaatacaaaatctattgtttgtttgtcaacatgtatggttcgcttttgacgaacatcaatcacctgtttgctgtactgaaaagaatacactgttttctcttcaatcttgtttagtacatgctccaaagacacattgttcaaatgaagcgttatttttttattttgtgcccaacctattcctgttgataatagcacaattaaaaaaaataaaaatgcatactttttatttttcatagttttatatttttaataatttttatctctattgctttactggttttaaccaatcttgttttatattcaagactgtttaaaaagaaaataccacataaaaatacatgaaaaaaatggaaaaatctcttcatacagtcaactaaaaatcaaaacgccagtagtataatataataagattaaaacaaatgtaatataaacagcaaaagctgtaaacattcaaaacttcggaaaatgattacttaagtatagctgagttgtaagagttttttctttttataaaaaaaacttattatccacggagactgaaacgctttgcagtacttaaatattgatactgtaaccaatagagatttaataataaaactaaatactataatggatgacattgattatttcagttcgaagcaaactttagaacgaatatcagcagatgaagaagccatcaatgcctcgaatttgccaggctcagctatccatttatgctgtttttcgtcaaagaatgaaagtccttcagcagtaatagtaaacgaaatctctttggtctcattgggctgaagttctactttacaaaatcccttcaattctttaattggtcgaattacagaagagttcaagcatttaatatatagctgtacaacttcagctccagcacgatttcctgtatttgtaattggaatagtaatatataacttttcactcttttctatagccttactattcactttggcttttccatactcaaatgtagtatagcttaaaccatgaccaaaagggaaattaggttttaacttgtttttatcaatgaaacggtagccaacaaataatccttcgttatagggtatatcatagaccttattccctaatacatccattcctttatgtcctggatattcgcccaatttgtgagcaccacattgattaagacaagcataataggtatatgggagtttaccgctagggttaacatctcccattagtatagaagccaaagcattgcctgtttcacttcccaaataccacgcttgaagtatagtagatacatgatttttccatggcatagctacacctgttccactgatattgattacaactagttttttattaacttgcagcaaatccataatcaattcattttgattataaggcaaatccattgtttttctatctgtaccttcacaatcctgatattcgcttttgtttagtcctcctataaaaaggacgatgtcagcattactagctacttgaagagcttctgtcctcagttcttttggactacggtcatcctttaaattttgaccagttttcactccattatattctccggtaggatctcctacgtatccgcgtgcatatataatttcagcttgttctccgatacgttttttcagtccttccaaaggagtgacttcatatttgactttcagagaagaggaaccacctccaacggtcatcattttaatggcattttcaccaataacagctatgcgttttacctttgacagattaattggaagtaaatttgcattattttgtaacagcacaataccttcttctcctatcttccggcaagcgctcttgtgtgcatctgataccatcgatccccacggccgatcattattcatggcagtacggaatgtaagtcttaatactcgacgcaccttttcgtttaattctttatcagtgtaaatcccttcttttattcctttcaagtacgagtttgcaagccaataattatcataggcattgctagtaccttccgttaaaccatctgtccaacttccgaactccatatccaatcctccaattatagcggtatgtgtatcatggacagctccccaatccgatatgaccacaccatcccattgccattcttcttttaaaatctgattcatcagaattggattataactagcatgttcgcctcgaaataaattatagcctcccataaaactccaggcttttccctctacagcagctgccttaaagccgggaagatagatttcataaagtgtacggtcgtcaactatagggtttgaagtgtgacggttaatttcattattatttaaagcaaaatgcttaacacaggctgagactccattgctttgcactccctgaacatatggtacaaccatgtgactaattagatatggatcttctcccatatactcaaagttacgtccacaaagaggagtcctataaacatttatacctgggccaagcaatacacttttgttgcggaatcgggcttcttcaccaatgcttttcccatataatgaagccattcttggattccacgtagctgctagacaagaaagtgcagggaaagccatacaagaatcattggtccaagctgcttgatcccattcatcccacatgacttcagggcgtacgcccattggaccatcagtgcaccatagttctggaatacccaatctaggtacaccaggagcactgaatttggattgtgcatgaataatattaattttttcctgcaaagtcatacgagaaagagcatcttctatgcgttgttcaattggttggcttttatccaaatagattggagtttgcggtgaagctgacattccacaaaataaaaaggcgcaaaatgtaataactttcagtatttttcttttcatatttagtgattttaatattaataaatgtctatgtgttattttgaaaggaaacaagatatgccaaccataccttaaagtataattcatacatactatactgttttatagcaaaatacaacaataattaccccgttggcaaaagcgagttaaaggataattagttctgtcaatacccttctgctttttgcaattacacatacaaaaattattaattcataagttttctgataatgctacaaagtaaacaatctttctatgtctttttgcattatttcgtttaattataaatcacttataatttaatttttattaacaattgattacaaaaaacaatactttaccttgacaatgttaaacgactggttttaacgcctttaaaagtcatttttacaggttttatataaccttcatcatcaaaaaacatccgttcaatgcaaacaacacgagcatttccatctttttcatttaatggatgtcgatgatacacaatataccattcatcatctttcaatccttttatcacagaatggtgtccggcaccagtagcaatgcttttgtcctgttccaatattttacctatacgtttaaaaggtccgaatggtgaatctgcaatggcataagctacgcaatagtcaggaccggtccaatcaccttctgaccacataaaatagtactttcctctatgttttagcataaaaggtccttcaacataattttcaggagttacttccttgtaaaaagagccgtcctcaaaaggtataatatgcagtaaatcatcacctaatttcatcatattgcaatgtccccaacctccatagtacatgtaataactgccatcatcatccttgaatacaaactgatcaataggctgtgctccatttataatctcattaattaatggtttacccaacgcatccttgaacggcccttccggactatcagcaacagcaacacctataccaccaatttcaccttcatgtacgtcattagctgaaaaatatagataatattttttatttgcataaatgatagagggtgcccatagagccttttttaaccaagaaacattttctactgaaagaattttggagtgttttttccaactcacaaggtcagatgaagaaaaagcatctagaaaaagttgctgctcgaatggagctgaataagtaggaaaaatccagtaacgattgtcaaatactacaccttcaggatcggcgtaccatccatcaaatacaggattaccactttcttgaacttcttgtgttttacttagagaacacgatgaaaagaattgcccacttaacaatacataaaacactaacaacttgtaatttatatttgacatatgtaatatgtttaaaagaaatatggatgcagtaaatacgactgcatccatacatttaattatatattataatttattttacctcaatcaattccaatacccaactgtcatattccttattcaaatcaagagcaaaacctgcgttcattaaaaggtcgccagagaatacccgattattcaagtaacaaggtttgtcatctgcagccaaatttaattctctgattttgtacttcttgtttttatccaaaccaacaagacgaacatgcggtaattgttggttgacatagtgttccattttgaaagcaaagaacaccgcacgttctttattctcagtaacatacatcatagacgctactcctctcttttcatacggagaaatcaaacgatattgatctccattttgaataaccggacgaattcctttataagtgtcaatggctttttttgagaattccttttcatcagcgttcatattctttggttgaatttccatacctagacggcctgtcatagcgatatcaaagcggaatttcaacggaacgatgcgacctgtctgatgattaggtgatgcactgacatgctgcgccattgctatagatggatagaagtaagaagtcccccattggataaacagacgttgcaaagcatctgtattatcacttacccaaaactcattgaaataaggcattactccgtagctggcacgtccgccaccactaccacaagcttgcataactacatctggatatttagcacggattctttccaatacatttattaagccacgatgatagtcaatataaatatgtgattgtttatcttttggcagataacttgaaccataattcataacttctccattagcatcccatttgatataagcaatttctggatttttactcaacaactcatccaccacattgaaaacgaaatcctgtacttttggattgcataaatccagtactacttgtgtaccgccacgaccacacattaattctctatttgtaggacgcagtacccaatcagggtgcttttcaatcaattcacttttagtattagtaaattctggttcaatccaaataccaaatttaataccatattttttggcagtatctgtaagacctttaatgccatgaggtaatttttgggtatctacgacccaatcacccaatgatgaattgtcttgcacacgacgatatttatttccaaaccatccgtcatccattacaaatagctcaccacccattgctgcgaaatccttcatcatctgatccatttcctgttctttgatgttaaggtatactccttcccagctgttcaacagaatgtctctcggtttatcacagttatgcaccatgcccatgcgagcccaacggtggaagtttcggctagctccgcctaatccttcacaagaataggtaagggcaagtttgggagtggtgaatttttcacgaggttcaagtttgtattcagaagcttcttcgttcattccggcaaatacgtgatgcacatggctaccatacgtgtcatcagaatcaattctgattttcgtacgtcccccccaacataaaatagctccaattacacgtccgctattttcttgaggtttaccatctaatgaaaacataacctctgaatgttcacctaatccgttacgtactccatccatatttttgatcactttcattcccgaagttagtggctctgtagtaatttgggtttcagctccccagtgaccaggtagagaagaaagccatacattacctctacgaatcataaaatgacctgagtcgaagcgcttaagtattaccgctttcttttcgttgtgagaatattcggcccatgtttcaataatatctatagttttgaaagcacgataattcagagttacataaaaagaataaactcggtcttttaaatggataacggtaagtttggcattttcttcatcaaaagtttccactttatctacgattaaatccaatgtcaagttgccatcagcatgaactacttgtaatgccgaactttcataagctgaagtaccaaatacaggataaaccggacgacttaatccgttccatgaatcaaagacctgattaatttgatcctcattaattctgtcaccaaagtaagcaaattgcaattgttgaccttctccccacgtgttcaatagtatggatgaacggggagttgaaattagcactttgtcattccatgcttgaagctttttagcagggaataacaagcacagcaataatacataaacgattttcttcattttttataattgttcaattaaacaaattgttgtaatttgtacatatattttcatttaaggattacaaatggatccataagctttatgagttacattctgcaattatagtcttccaaactcattattttacaggctctccatcaatagctactatctgttttacaaatagttcacttccgctagacaagtgaggtggacgataagactccacaatttttattttcaacagatgtccttttattttttttgttaagtattcatctgaaaccttttcccactgcacatcattgattttctggtacgaacgttctgtcagatattcccaattattcaaagcgacaggagtgtaatcttctttaccaccaagtatgaattctgcatcatcagacacataatattcaattttctttatatcctgatagtcggtattctgacgttgagcccaacctaagctatgaataagaactgtctttttcatatctaccacaatcgtatgagggagatcccgcgaaccctgaaattgttgcggattttgattatcatcattagcagcttcataattggcatgccagtacgtataaaggttgttgtcaaataacataccaacgccaccgccatcttcaccaccgccccaaggagcatttttttggtcactattacaaaatacgacactccaagtgctacggtcgcaatcttccactatatacttgggattactcaaactcaaatagcaaacttcatcactcacagcaaatcctgtcaaagatatgctttgaattttcaaaggcaacagataatttctgtcactttcaagtggagtacgggaaactggtattgttaaattagcttcgttaatacctttcttgaaaactaaatttgggagttcataagcagttgatggcatcggtaagtaatcagtcccatgctgtttattatattcattgaccaaaacttctttattatcatcgctcaataaacaagtaaaatcccattttgacagaatgttttgaagagttgcctctaactgtacatccacatttttgaatttcatagtggaatgtacttcctcttttttaaatgttatttgaggctgttttacatctactaacagaagaatatcgtttttcagtacgtcaacagagtccttctcactatgaagtctgattggtaaaacatattggactccttcattcttcttcatttcttcataaatcaaatctgaatggaaagttacattaacttctttactcccttcctgtggttgaaactctaaatccgtagtagatactgaaaaagagtaggtttccttaggaataatacgataatctatattatccatcagcccataagttttgtttagctcttcctgatcgatgatagacaatttcgcatgggcaggtaaagacttgtcaattccagcctttgcaacatgaatgcagtataccggagaagactctactgtattcatattcatttcctgtttcccatattccttcacataaaggatattattagtgggtacatattgctcatcggtataattatctacaattccgtcttcagaatcactgcaagaaacagcggttatcatccctacaaacaatataaatttgcatgctaaatgtttcatatacttataagtttattcatattaaaattaccactgaatagcctggtcttcatccggaatcagtgtattgattgtacgttgcattgccatacttccagttgcacgatagcgaatcggattcagagggtcggaagtattgtctgtatagtaataatttaggtatatcactgtaacatgtttttccataaatggttccgtcggatgattttctatacttctacgataataacaattaccataggatttaatatgagttggattatccggatccattgcagttatctcaactggtcctgttacaacacccttttcatctgatataccttcaccaaaggtaacaagtactttatatttgtcacgattttcatcttcctcccaccaagttccagcatagaaaaagacacttttttcatctactacgcgcaactcacgactagatactgtagctgggtcattattattatcacccaaataaatgttcatcgcattggcagcatattcacctgaaaagtcattaaaaagatgtatatgcaataatgctttattacgccctttccataaattctgaacatacaaaggatcactatctatgcttagtggaagtatccacttttcattcaagtcaattcctttcagattaaaatctatttgataggtctcagtattctttccactaggaatgtgacaaacatttcctgtgggaaacgaataatatttttccggaagttgatgataccacaaatcctggcggttagagtatttctcaatattcaaatcatttatagtatcattatctacactgattttcacatcaatatcgcgggcattgttttgtgacccactgacaatgactggaagtttaaacttgccagtaccatcaggttggtaacgcatataaatatcgtgtacaccattgctgccaggggtagctttaaaggaaatcatttcagtatacaattcgtccttccattcatcattgcaagaactacacaaaacgcacaaccccaacagtgaacttattatatagtttttcatattatacattctttaaaacattatatcattaatcataatcttgccaaccgggagcttgagtcatatttttattccgttgcaattcatcataattcacaggccagaaatactgtttccgtgaaaaggcagtttgaactccactcactcttacaggagtatagaacatttctctatttgcttcgtccaccattacattacaaccatagatttgcgcaccttcgtgctctggagctattttccaacggcgtacatcatagtatcgttggctttcattaaagaattccacttgacgttcatgcactactcgtgtaaagaacaatttacgattgttataaatgtcatcaggaaaatcaggtactcctgcacgcatacgcacaggtttcatacctcttcgcatttcattaatatcacgacgcacggtataggttgtattaccatcccatgattcaatctgataattatttccttcttcaatattgttcaacgcttcggcatacgaaattaaaatgtcagcatagcggagtgccggttccacttttggaagagcagttccattgttaacataacaatcacttggatgaatatatttttttatgccgattcctgtggctagccagcgttcactattgttggaacgtccgtcttttgatccacgataataccatacttgctggttcttcacaacttccgaaccgtcacctgtagcagaagtacagttccaacgtgcaccattgtaacctacagatgcgtagaaacgcggttctcggttggcatatcccatccatactccgtcttccagattgtcataaggacggtcttttttattttccggtcctgcaaatcctttcagacattttttgcggtcgaatgccgtaccatcagccatatcatatgcatcacattgtttcattgtcatactatggatattccatcctcctaaagaggcaggcatctggtgtctcaccatgtccagcacatcactgaaatcacctaagtcaggatgaagctcagctccgttgtttatgacacggctaaaaatcatttctggattattgaagaaatttacttcaccattgaagactgaacgatatgattcaagtggatcaatatctttccatccgtcggggaagtttgcttttgaatatacaggatgataaggaggaactatcgtcttcggattagcataatcaccttctacttgttcttcacgaaatttagccgtataaagcttgtaccagtttccttctatgacatctcttgccgctgcagcagcttttgcccatttttcttcactatatttctgaggaatcagcttacgtccggttttatccacaaagtctgccatttctgtattaccgtttgccagaggactggcaccgtacagataagctttagcacgaacagctagtgcagctcctcttgtggggcgtgcaatgtttaggttatcgcgtcgttcgggcagttccttagcagcttgtttcatctcttcagcgatgaaatccacacattcttcgtaggtgttgcgtggaatgcttaattcatcataagactttgtatagtccacgccagaagctggcatcaaaggaataggaccatatcttttcaacaaaagccagtagaaataagcgcgaaggaaacgagcctgtcctttaatatcaagaacctcttcttctgtaaaagctgtattctgatctactttgttaatcagcacggtagcctgatatatggcagcatatgaccatttccaactattttggtaataaccgtcataaccattgtcgtatccatagccgatttctcctaacttgtatgccttgtagcggtcataggtttctgtaaagacctgatcgtctgcaaagttttgcggacaaaacttcgaatgtcctacttcaacattatcacccaataaacggctataacaataagacagccattgcatcgtataatttctgtctgtgaaaatcttttgttccgattgcatatcgttgaagttcttttcaacattcaaataatcagaacaagaagagaaacctattcccaaagaggtaatcgcaattcctattaaagtatataattttctattcatatttctctgatatgttttaggattataaattcaaggttaatccaagtgtaaaggttctgcttaacggatatttctcacctgtagtacttcccatttccggatcccaaagatcgaatttagagaaagttaataagtttgtacccataaagtaaacacgtattttattcaaatgaatccgattgatccatttcgtaggtaaagtataacctacttccaggttctttaaacgtaggtaagagccatcgcgcatccaataggtagatgtacggtagttattggcattacctccgaagcttagacgtggatatttagcattcgggttttcattttttcccaatgaccaataatttccgtcaacatcagtcataatattcccccaatatccttggctgaacggataagctacagcaccttcaatagagaacgttgattttcctgctccctggaaatgcagattaaagtcaaatcctttccacatagccgacaaaccaaaaccataaatcaaattcggcttgtctgtagcaccgataggcacaacgtcagcgtctgtaatcaatccgtcaccattaacatctttatatttgatatcacctggtgctacatctccgaaggtttgggttggactgttccggatttcctcgtaatcacggaacaatccttcagcaatcaatccgcgtaactgtcccacacgaaaacctttttgtctggtgtagccatagcgactgtaaacctcgtcatattccttgatttcattcttgctataagtcatgttagcacggaatgtgaaatcgacttcacccaacttatgattgtaggcgatgttaccatcaaatccttctgatttaacagatcccacattggcaaaaggctggtactccaacaatccaatgctgaaaggcagataggaacgttgcatgtaaattccttcacgttgttcgtggaaatagtcgattgtaccgttcaatttgtcgttgaataaagagaaatctagtcctaggtcatgtttttcggaaacttcccatgtaatgtttctcgatgcgaatttactataagtcaaccccggatagaatacaccgcttgagttcgctgtacctatatctccgtagtggtatccatatttatcttcagtcttatatgtggacaaataggggaaacgagtggctaggaagtcattacctaccttaccgaatgaataacgtaacttgaacatgttcatccaggtaagattcttcttgataatgggttcttctgcaatattccatgctacagaataagcagggaagaaaccgaactgatatcctttggcaaaattctcagaaccgttataaccgaagttgaaatcgacaaaataacgatatttccatccataagtaaaacgtccggctaagccctgatgacgacgatcaatggcctgaattgcatttttctcaaaattctcagaagtatttacaatcttttcctgtgtgtatttcaatactccacctaccaaatgatcgccaaatgttctgttatagtgcagttcagcttccaggtattctttacgttcacctgttgaaatcggatggatggacattaaatgttcgttttctacttttgtgaattccaattctccaaaactattgcgtttgttttgagctttccacatgtcaggccatttgagatgagctttactattgtgagtatttgtatcatatccaaaccggccgtagaatttcaatccgggagtgacaaatttcaaatcctgttctaaattgatgttcgtctgaatcttattgttccaattttctgtataacccatctgagtgaccaatagccatggactcacttgattgttactaccttgtgcagcccattttccgtctttatatttcacaggtgttgcaatgggattatatgaaaggactgaagcccaaatctgttcaggagtacctccaggctgattctgcttatctagtgaaccgcctatacccactttcagcaaagttgtctttgtcagattcaagtctacattcatacgatagttccaacgacgatagtttgcgttggtatcatagtctttgagaccttcatcggttttatacatacctccttcgtctacatagctggcggaaacaaaatagcgtgctgtggttccaccaccacttaaatcaacagtagcccgatagataggagcaccttttttaaggataagatccatccaatcaacattgggaaataattcagggtctagtccgttggcaaacagctcaatatctccatctgaatatggagctggtttactacgtgtagtaaatgcctcattcaccatttgtacgtatctgacaccatctacaaatttcggtgttttcgtgcgtgcgctgtatgaagtttctatcttggcatttactcttgtcttaccttcgcgtccgcgtttggtggtaatcaatactacaccgttagcaccacgagaaccgtaaatggcagtggcagaagcatctttcaatacggaaaacgattcaatatcttccacattgagttcgttcatactacgttcaaatccgtccacaaggaccagtgcaccggaacctgcaccaaaagttgaaatacctcgaatccaaaactctgaaatgttttcacccggttgtccggaagtctgacgtgccataattcctggtatattaccggccaatgcattggtaatactggcacttggcgttctcagttgagcaacatctaccgtagtcaccgcacctgtgactgtaattttcttctgaacacctgtaccggtgatggttacttcatccaatgaggtggtttcgttttctttcatcaccacattgattaattttcttccttttacctgaatttcctcgtttttaaatccaatataagaataaattaaagtagaaaattcagggacttttattttataatgtccttccatatcagtcatcacaccgaatcccggcatgtttttcactacgatatttgcaccgataagaggttctttattagcatcagttacaatacctgtaacttctatttgttgttcttgagcataagagacgttgataatccccaatactaaaaacaataagacgactacttttttcatttttaatagtatattaaatagtattattcggttcttagatagcggatacaatggttaccgttatctaccagataaaaggtttcttcatctgcatcgtaagtacaggctctcggccagttgaaacgtgcttcatgtagaggatccccgtcaatatagcctgtatacttaccatctgctgtataattgctacgtccggcgataatggagcaaatgcggtctggggtaattctccacatacagtgtcccacctggtctacaaaacagaaatcgtacatatctccgtccggtctgtttacgtacccagcattcttggcaaaatcacctccccacgggcggccaaagcgagcttgagcacccggtccctcttgaagattattctcgttgttcagactgtaataatccccggcatagagctgcaagccgtttaacattcgcgtttcggcattatagtcacatttgtaaatagcccctgtgttgcggctgaaaatcaagacatatctaccttccggatgtgcttttatcttaatctgctgttctttgtcaatggacacttggttcatagaacacatcacctgatttcttctgtccatatagggaggtgcctgtgcatttcggtccatttttataacggaaccgtttgaccaaaccgtataaaagaccgttccgtcaggcatatatgctactgaataagcactcggaccataacaatatggacgcaacttgctgaagttttcagaacgaagagcataccagatgtttggtttctccacattaccgaatgtatgattccagttatcgtcaggaatcaaaatggtatcagcgtcagctgaaagttcaaaagtttgcataaaaggtgaacggcttcctgagtaaagcgtggtgattgttctcttggtaagatttacagcacgaagcccttcgcttccaccctcataatttgaggtaaaaataactttatctccattttcagattttggatcgaacatcatccaatctgaataaggtagtccagctccatcgtcaaaggaaccatcttgaaatggagctgctcctgtattcggatctacatttcttaacaaagtacccacgacttttcttgactgataattaactctttcttcaaaagtataatcagttaccacattttcgtctttgtccttgattaccacatttacaataccggaataagcacgagaaggcagcatacaatgaattttattaccattagaagcaatcacaggggctttctttccaccaatagtaacatggattttggattcatccgtaccaaaattagaccccatgatatacattcgggtacgtactcctccttctttcggagtaaaatctgtaaactcaattggccttgacggatcgcatggcctcaaatcccatatagtagggtctttgaagtcctctttacatccaaacattgacattgtacacaatgtcagcgcagcaataaagcatctattcatagactaatattaaaaaggttaattaatatatttattttacagtaatgctatttgtgaaagttttatttctctaattgtttttattcttaaacagaaatgcactttctattgatacaaagaggaacacatataataatgtataaagcaattttaaggttaattctttcaattagagcttttcaaaagccccatacagtgttaattcctgtcaaataatacttttttgtaatggattcatgtataaatcttcacacctatcaaagatttggcagtcatagtattccacgtataacactttaaagactgttcacaacataattaccacatcactttaacatatttttcaatatttattttcgcagtcatttttttgttatatatttaccgggtaatcataaatgtatgagatatagaacatagaatggaaaatgaacaaattaataagataaagtttgtatcagaagattctttttatatagaagaacttaaaaaaggaaatataaaagcctttgaatttgtttttaataagtattataaagatcttgtctatttttgtagagttttttttaacaatcaagaagactgcgaagatttggtacaagatatctttgtgcgcttatgggaaaatcgtgaacatttcgaaattaggggttctttaaaatcttaccttatgacggcagtgaaaaacaatagtttagaagagcttaagcatgagaatgtcattagaaattatcaagattatgcaattgctcataataactcattcgactatgacgtggataattacattctatattcagaattgaatcaacaacttcaaaaggaattggataaacttcctaaagaaatgagagaagtttttgaaatgcaccgattcaagaataaaaaatatcacgaaattgccaatgaattaaatgtatcagtgcgaactatagaaaatcgaattagcaaagtgctagaggttttgagaaaaaagatggaaggcttttatgacttcattttatgtttttttatataaataaaatgagggtattttcttttgcaacagtcttataatttgtaacaagattaatatatgagagaagagaatcgatatagaatagcagaacttattctgaaatttttggaaacaaaggcatcgctagaagaaatagttgaacttcaagaatggattagtctttcagaagaaaacagaaataattttcagaaactgagaaacatttgggaaatgacaaatccttctgctagtcaaatgaacatcaacattgaatcggcgctactcaaaacaaaaatcagagcaggaatcgaaccgcgaaaaaagattgtttccacatctcaaaaagtagtattctattttcaacgaatagccgctattttatttctacctactctgatagccttgtccatcataatgatgaacgacaaagatgagcaattagcctattataaagcgagtacaccttacggatctatttcagaaattattttgccggatagttcgaaagtgtggttagatgttggtagtacattggaatatccttcgcgatttataaacaatacacgaagggtatacatgtgtggtgaagcatactttgaagtacatgcagacaaaaaacacccttttattattcaagctgatgaattggagattacggccactggtacagcctttaatgtttctagttttgcacagagtctggaacaaaaagtcacattaatatctggaaaagtatccgtttcacaaggaaataaaataaaatatctactgcctgggcaacaactgacctatcagcgaaataccaaacgaatgacaatagcttccatagatacattcaaatatacagcttggaaagatggtatcatcgcgtttagggatgattctctagaaacaattttccatcggctagagcaaatctatcgggtccgttttattgtaaatgaccttgatataaagaaatatacatatagagcaacatttaaaggagagactttggatgaaataatcaattgcatggaagaagggacgcccgtaaaattcaggaaaagagacgacaaccataaggagggagatacacttattatagaagtaaataaagactagtattttaatacaacgaagttcataaaacaaaaggaggctgtaaattaaactgtgtcagcaaagagtaaaataaaatattaactttgctaacacagtttaatttacagcctccacattttcatttgaccaattataccttacaaaggatattcctcaaaagcatacaaaatggtagacagataacgttctccagtatcaggcaataacgcaacgatcatctttcccgcattttccggccgcttcgccagttccgtagcggcatatacagctgctcctgaagatatacctaccaataaaccttcctgtttggctaattcacgactcgtacgaatggcatcgtcattctgcacctgaataatttcatctacgacagaagctttgtacgttttaggaataaatcctgcaccgattccctgaatcttatgaggaccaggttttcctcccgacagtacaggagaatcagatggttccactgccactatctttatactcggatcacgcatcttcaatgcctcacctacaccgctaactgtcccgccagtacctacaccggctacaaagatatcgactttcccctcggtatctctccatatttccagaccggtagttcgtaaatgcatggcggggttagcaggattctcaaattgttgtaaaatggcagctcccggagttacaccttttaaatcttccgctttggcaattgcccctttcataccatccgtaccaggagtcagcactaattctgctcctaaggctttcagaagattacgtcgctcaatactcattgtatcaggcatcgtcaaaatcagtttatagcctttcgctgctgaaacaaaagccaatcccacaccggtattgccgctagtcggttcaatgatcgttgctccgggttgtaagacacctttcgtttcagcatcctcaatcatagccaatgcgatacggtccttaacacttcccgcaggattaaaagattcaatctttacaatcagacgggctttcaaatcattgtttttattatagttactaagttccaataacggagtattacctactagatccgtcaatttctttgcaatcttttccatatatatatgtttttaaattttcttgttttaagatatgacaaagatagcgcagattctgttcaggggaaataccatagatgtggtaatttcataccacatctgtctgactttcgatctagatactacaataggaagtcagccctcataggactaaatgtatcaatcagtacacctgcttccagacaaacgcatccatgaggctggtcaggttctacataataaccgtcgcccgtagagagaatttctttccggtcaccaatggtcagttcaaacttgccgcttgcgacataagtagcctggctatgataatgttgatgtacagccccaacggcaccttcctcaaactccaccttcaccatcatcaattgcccgtcatatcccatcatctgacggcggattcccggagctggtttcttccaatccaattctttctcaaactgaaaagtatcactacgtgttttcatcttccaatctcttattatttataactatattatttaaacctcttcacataatctacaatcagatagcaagccggaccgagcacctgaccatgatcgaatccttgcatctcatacaacgtcactttcttattacctatacttttcaggacagcttccaacagcgcattttcttcatatcttgccgccatctccagatgcttgtcccccgttatcagtacaagaggggctgtttccttgcgggccttatttaccggagcatattcatcaaccaccggaataccgttaggcaaaccacgttccttacgaatagtgaaatgtgtcaccgtctgaccactaaccggaagataagcagccacactatcagcatctactccgtatgttgccatatattttttatccatcgccagaatcaatgaaagataacctcccgcagaatggccggaaacaaaaatgcgatccttacgtccaccgtacttctcgatgttcttgaaaacccatgctacagcttcagctgcatcctcaatataagcaggattcttcgccttcggacttaaacgatagtttaccgccaccactgcaaacccttgttctgtcaattctttgggaataaatttacttccaccttccatacccccaccgtggaaccatacgatagtcgaaaaatccctcttattttcgggataataaatatcaagtttacaacgttccagacgataagcgtctatttcagagtcagggacataagatatatctttatcggtacaataagagttctgtgcttgaactatgcatgcagaaaacaaaaagagaagaaagcaaatctttttcataattttattcattttcaatgattcagtattacattaactatcaacctaaacagttcattcttttttcagacaggaacaaagataagaccttattccaagaacataagcaaaaaagactaagaaaagaactcttactattgattgggtaaagttccaacttggacaaacgctattcaatttaccacttcaaaataataaaagatcacttattgatattgtttttaacaataactttggcattaataatatcccgcttatcaatgtacaattcaggtttctcacctgcgctttccaccaaagcttcaatggtgatacattcatccggcaaccattgtttaaaatatagggtgttatctttcaactcggctatactattgtctgtagcggatatttgaataatctgttttatatttctcgtatacaaaggaagtccatgccctttagtcaccaaagatgactggattccctcacccacaatattctgatttcctgtattttttagcatatagcatattctccaaagattttcaatgggcgtcatatcttcatacttcacaaaaactgcaaggcccggaacattcggtctttgtgtcaataacgtattttccatacagtaaattgtcactctggtttttcttcttgacatgtgtgccaaaaaaacagtaaatagtgcgctgataatagcacagattatagaatttatagttcccatggtatatctattttctatttgttagcctgattaactgctgtgtacaatactctaactgttcattgacaaactccagtctcttctctaatttttcaattctttgcaaagttgcttctacatcaacttccactctttcaatcttctcctccacatatttgacagtttgccaatcatacttattgtttcgaacctcctcctgtgtagcaatataagccgggcaactattttcctgccaaacctgttcaccactaagaaaccccttataagtgtttaaaagctgttcgaccattgtatccgaaagtttataaatacctttattcgaaatatatcctttacgcgcatccataaacaaagtctgcgtcgtcttcctgtcttttctgaaaacaagaatagccgtagaaatagccgcaccataaaacagattttgcggtaactcaataaccgcttcaagcaaattatgctcaataatctgatgccgtatcttactttcactagtacgaaacaaaacccccgccggaaccacgacaacagcccgcccattaggtttcaaacttgccagaatgtgactaatatatgcccatgtagcctgacttctaggcggaataccatattgaaagcgtccataacgatcaaactctgcttcctctgttgcccacttatctgcaaatggtggtatagaagcaacaatatcaaaccgctttaacccgccgtcatccgtcagtttaggattactaaggctatctccccaaaaaaaagtggaatctttgaatccattcaacatcagattcatttttgtcaatgcatattgattccagtttgcctcttgcccgaaaatattagctcctctgattccaacccttttaccaacttcaactagcagagtaccactgccggataccggatcgcacaaactattattatctttattatcgcctatcaattccgccaccaaaccaataacctctttaggagtaaggacattatttatcttcttacccgcctcttcggcaaaaatgtacaataacagattatataaggcaccgatatctattaacttgccagcatcatctgttaatgtcagtttctgaaaaaaatgaagaagttcacgcaatttactcaatctctcattcgtatctcccaatatattactttcgaagttgatagctctattaatttcataaccttcaattacacggctgtttgcttgctctaattcataaagagcaacatttatcaacttgccaagctccggcgagccaagttctttgtaaagatagtcaaaagagctacgttcagacactaacaaccgaaggaaaggtttattctcatctgactgaaaagagtcatttgatttgtagtactcacttgcagatttcagaaatagcaaagccagtacataatccttatactggttgacagaaagcgttccacctaagatttgtttcgccttacccgctatataatatgcaatttctatcataacatatttcattttaaagaatccatcaacaactgttcctgcaaactccgttttagttcattgatttcactgtaaatactttccccctctcttctcaattgatccatctgtacaataagctgttgtgtctgcatagaaggtatgccgatctgaagatcacttagtaccgattgaggaattacctgaattcctgtacctaccgatgatttttttaatttattaagaacagatggggtattgagaaaacagcaaagaaattctggtagtatatcttttgatataatacgtataataatgaatgacgaagaagctaccattttttccactaccccatcatacaaaaaacaataattagaggctcctttagccgcaaacaataaatcatttttccgtaacctgtattggtcaccaatccccctatccaccactgtagtgatccgactgtaatcaggtttactccccggattaatatccttaacctgcaaatactttatatcacctgccggatcgcttttcatatatatgccagattgcatcatggcaatatcacttattctctttatatcctttgatgttatatccatatccatacaatacagtccctacttaaataagctattctaaaaaagttaaagaataaatttcagttatcaattcaattacactgcaaatatatcactctttttgatatatcaatgcaatataaggaaaataaaaacacaaaaaatgaaaattacttttataacctcttcttattagaagcaatattaagtagaatccctactaaataagaataagtaaatatcaactgaaaagatatagttacatcttatccgttaatacctgataagtctgattattccaggaggtagtaacagtaactttcttattatctacccatccccacagcttaacactactattttgctggggtatcatgtgatctcccatcatagcaggttatttaacctttccctgtataaaagatgaaaaacagaagcataaaatcaaaatacttagaagctttttcatattgttcatataaagtttagcccaggtctacactaaaattgtaattctgggccaagattcgttcatatccgttaattcattaccaaactcatatcgtcaaggaacggctgttgatgtccatttcttctccaaacaatatataacgtgagttcgaaataaaatcaaaaaatagcaagttgtccgtcattgacaaaatatacgtcaatggcgggcttcttttggcaaaaacagtatgccgcgatagccgacaaggagttggctataaagttaatgaatgaacgatgtctggagtgttctatctgcgcaatgttcttcaattcgtcattgactgtttcgatcagggctctttttctgagcaaaatcttgtcggcaatactcatcagtgaattcttcatattgtttttaactctagtaacaagctgtatgccattaagaaaaaggttctcaaacagagcctgaccaatatattctttgtctgcgcatagttttcctttgatgttctacgaaaactcaccttgctaacggttcccggtcatccacgtttccaggcgtgaacatgaaattgaggatctctcctttgtcattgattatcagatgcaacttgaatccgaagaaccatcctattgaacatcttccacgctcggcaagcccttcaaatgtcttattataccttaatcatatatttttcctgttgaaatgtaaattccttgcaaaaatcatcggccatacaataaatctctgtaactttagactctggaaacatagcggtaatcgtttaaatgttataattcagcgctataaatttaatacttttatcgctatgtttctaattataagtgaaatatatttattcttatatcgaactcacgttaaatatctatcccccccaaaaaataaagttctcctatccccaaatatacccgaagatatatttcagacaggagaaccaccataatagacaaaacaatagtctgtccctttcttatattgttcttaaaatccctctctaaagttttttgatagagaaatcagcaaaacggatttcctcgtcacgcaaccgatcttgccaactccggttctcacccaaataacggtagataccccatttggggcgaagtccggtacaatccgtacgccacatatccattttttcaggacctagttttaaaagaacttttccatctttgatacgtgtgatgatcacttcataagaaccgttctcaccgaaacaggctttttcttctacctctacccagttgcctagaaaatcggcaaggtctgtactaataagggtagaagtgcttccaccacgtttatcataacgtacccgcaattgttgtccccctttgctgttagaataggcagtcagagtgataagaggagaactgacatctgctgtgcccgacgagttatcaatacctttcaactggtgaagatgagaaaatttagtcgtcgtttgaaaccctaccggcagacagaatttccaacgaaataccatagcctctcccttttgtccgacaagacttttcggagatttgttatctgtctttatctcattgcgctgacggtcagtaatatttgtaagcccacaatcatcatcgatcgtagcatgaatgaaaaaagcaaatacatacttattcaactgattatcataaacctgctgaatatgctgaaaatgagcggtcttatgttcacgtgaagaatcaggcgcttcatggttatatcccgaacgtttaatcaagtcatatgtttttatactattgccgtcagcaatcaatgtaccatccacctgctgttcaggtttcggttgttctttctcgtctatcacttccgatgaactgttggagcaggcgataaaagcaaaaagggctaaaaataagattccttttctcatttggacttatttaacatggtcagtcaggaaatctaccgatttgaagaaaatctcttccattttatcagaagtctttgaactgacattatggtcataatattcatatctcaacagttcacagactccccctcttttctttaaagccgatgcaaatatcccgctctgctcacattctaccgtaacatcacatgtaccacataccaacatggaagctggtacattcttttttggaatcaggttgacaggagatacttcccgaagtactttaggatccctgccacagaaatatccaatacgctgagggtctttcgtcttttgaatgatagccgccttttccaaatcataaataccggaataaccaacgaaggccttcgttccgggtacagtcattgcagctaccgcagccaaatgagcaccggcggaagttcccagaaagccaaagcattcaggggtgatattcagctctgcagcatgttcccgtatatatttcacagcatcccaaacatcttggatagaaactttcacggttgcatcagattgcggagccaatgtataagatacacgtacaccagtgatccccttttgttttgctaaatattgggataaagacctagacgaaccgttattgccccgtgcccatccaccaccgtggagataaactacaaaaggagcagggttatcagtttctgcaaaatcaactgtcagtatcagctcataatctttatactttttgtaaacaatgtcttttgtaattactcctttataatccttgcttttcaagcgctttgccgtatcaatatacttttgattgcccaatgctgttcctgcttcataaagaagaatagctgcacgagactggtcgaaaggtttaatttgtttgaatttccaactttcgggattcagatagtagggatatagataatccactgcctgtgaagccacttttccattgggagcaggcgtactccataaattaataccaatttgactggtgatttgattagcttccatcaaagcttccaaagcgaaagttgaataatgtaaagagagggtacgtttcaactcttggggtaatgagccatcatcagcaatctgtgtacccatcttgggaagaatactttgttcagccacctcacgaatacggtcggtacggtctaagtaggctaataccatcagatgattagttcactcttgcttatcattactcctgatatattaaaatattatcaaaaatataaagtctgcgccgttcctcaaaaaacagtccatgcagaacacagagagatgttacaaaagataaaagataaagacaaggatggaatgaaagagctggtactccgccacttgtccaacctgattgattttgccaaattatcgaccaaaggagagattccggagttcgaatacgggcatatctaaaaagcaaaagaaagcaataaaaaaataatagaggaggacaaatgtcctcctctattattttttaagttaacagctagtctctcaattaagctgccggatcgggagcttctccgtgattaccgtccgaatttccgccatcgccagaatcagagccaccattccctccatttgttgccacaacgtccaatggtacatattttgagatactcatcttattcaacatcgtttttaactgacttcccggggtaaaaactatttttctcactatgatattactactatcgacatccttggcttctataccacttttagcgttaaaagtaggacgaagtgtaccgaactcacctagcttcaccgtttttccctcatccatatatccttccaatgaatcaagcagcccgtctaagactaatttgacctgaccacgatgagtaccacaaatcaatgatacattcttacacaatttcgagaaatcaattactccatcgctcaccggagcagcgacatacttcttagttttggtttcatcgaaattaaagactctttcttttactgcatactgtaatcccataattttaagtttttaaattgtttgataaaaatgttgttttgtgatcacgatgcaaagatacagcaagggaaaaccaccgaagtgctttaatggtccttaactacccgttaatctaaaaacactcctttgaacacctgcctaaaaaaatactcgcttttgcctaaaaaaagatatccatcctcctaaacgcagatatctttttaggcaagtatcgtcttatttgataagataggtagccactaccggataatgatccgattctttatcggcccaataacaagcattgtacgcctttactgtaaaggcttcattcggagcataaatcagccagtcgcagacataagtcggacttggaacgggcactgtccacggagcagcgtcgctcaaacagtttactgtgaaatacttctgaaaagcagtcatggtaacagaaccacgacgggagttcaaatccccaccgagaataattggtttgtccagttgttctatacaagcaagaatctcatcaatctgtttcagacgggtagcatcttcgtacttatggtccaaatgtgtcgtagcaaaataaaattccttgccctctttcatcacttttacataaccaaacgaacgaacgtaatcgttttccttcaatacactcaatttaaagcttttttcctccgaaatcggaaacttggaaagaattacatttccatagtctcctccggtaggaatatcaagtgcatgggcaaaataataatacttcatgcctgtcagtaccgataatctttcaggagtattccagggattaatctctgtatttctttctatttcctgaagtgaaacaatgtccggatcttcctgttttataacctcggctattttatcaataccttgtttgcgcccactgtaagtattgtaagtcatcgcttttactgtaacttctttctgcttatttttgtctctctgcgccatcacaggggacaacagacagcataccagaaataacgaaatgcatattctgaaattcatatatcgtcaattagtgagtgaatgttatccttcaaaacaatcttttttacctaataccctattaatccttttctatcttgcgaatcttatgattccaataatctgaaacatacaatgcaccgtcgggcccgaattgcactccttccggatgattgaactgtgccttatccaatggcccatccgtaaaaccggaagtacctgtacctgtataacttgtcactactccatcaggtgtaattttcgcgatacgatgctttttacggactgctacataaatattgccttcttcatccaaatccatctgacaaggttcttggagtctggcatcgtttccttgtccttctacaaagcctgttttatcatattgcccaatccaaatatgaagattagaaaatagtccggtcatcatatcataatcccctttataaatcacatccttctcctgtgaactcatatacactgtagttcctgccttatcgaaaaggatacaacggatcttcactttcgatgcattctttccgtccgcatcgggaagttgttgtccggtagtcaccatcgtattctgttccggatcatatttgtaaatcatggcatttccatgagctacggaaaaaacttctcccgtaacaggatgtacgcctacattggtaacaccgttacctaaagacggagttatcgaccatattgcagcaagacttccagtatcatactgatgcgtatcattactccatgacatagtggcgatatgtgcgcttccggaaccattcgcatcattagacaagaacaaagtgttgccatccagtgaaaaagcgatattcatcattctaaatgcaactccacccgttacgtccccacgaagaaaagtagctacttgattatctttcgcaatacgaatatcacggtcatcgtcttccacaatatacaaagtgccttccttatcaaaggctatagaacccggtttccaaaggactgcttccatcaaggaaccctcttttttctcagtcttggcagcaggaacatagctgccgacatacgaacttacaataggagactgagaatattcaaattctgttttataagtcagttcctgaatattttccccctgaccgatatatattttcaccggaccggagccagaacctctctgcacattggcagtaataatattcccaaaagcacccgtcacctctgcatctactccgttgaccgtcactcggatattatccaagtccgtaccaaaatgagtaccatataaagtcaggctagtagactttccacctgccgtcggagtatacatcgtaatcttaggagtaacttcaccttctccgatttcaggcgtcatatcctgccgattctcatcttcgcaaccagcaaaacctactgccccaagcaatagtgtatatatagaaaatcgtttcaaattatgaatcaatgttttcatgtttctatctttttagattaatcgtttatactgaatgtagctactaccggaaaatggtctgattctacataagcatcataatacacatcataagccttcggagccattcctttatccggggtgtacaacacgaagtcaatagcctttaccggaacgggagttccggtcgtcaatccatagttcccgttcaggcaaccaatatcaaaacgctcatacaatatcttcatcgggcccgaatcagccaacgcattaaagtcaccggtcaatatcatcggggcatccatccccttcgttttttccagaatagttgaggtctgattgatacggttggtttcattaccgacatgagacaaatgagttactccgaaatagaagttcttcccctctttttctgttttcacgactcccatagagcgtgggtgaacatcttccacggtctctattctcggtaaatcataattcacctcgtcgcttatcggatattttgagagaatcagattaccgtattctccaccatccacatcacgggttttaacgaagaaagcatattgcattcccgtcacctccttcatcaaagcaataatatccgctttctccacctgattggttttcgtttcaaactcctgtaaaccagccagatccggatttatctttttaatcacttgagcaatagcctccattcctttctttccagaataaactttctgaccgctgtatatattgtaggacatgacttttaccagtactccatccttatcgtcaggaggagttacaccatcatcatccgaactacagccgataaacaaaccgcttatcaacagtaccagtaataaatagaatttatgtttcattgttacattctttttttatcgtttaccttatctgatatcattcacagttacttccaccacccggctatagttcacatacggtttgctttccgccgttaccgtagccgcaacacgcacgtatacccgattcttattggaaacaatcttatagtgattctcaataaattcggtatcactcatcaagtcaatgacatgcgtaccactggtctttgttcccaatgaagaaagagtagcatgattagcattgttcacgtctactcccggagcataattccagataacggaaacatctgtcagttgcaatgtttcgttcgatgtctttgcatcgtaggtaagtgtcagtttattatctgcggatacagtaacatcaagactaatacgcgaaaatggaatggtatataagtcaacctgcgtttgtccgttcacagtgacatatccctcacacactccaacaaaagggccgtcctttgcctgaatgcggtaattaccattaaatactttggtatgctcaaatgtcccatcctgccgagcccggaaatcgaccgaagcagtagctccggtattctgctcatacaaactcatcatcaccccactacttcccggcacaggcatgggaatcggctcattcgtttccttgtcataaatggtgccatgcacaccgccattcggcgcatcataattgtcgatgtcattttcgcatgctaccatgaaacaggcgaataatgcagtcaatcctatatttattattttattcatatcggtttttctttaacttataattgaacatatcagttgccgtaacccggattctgcgtcatcaacggatttgtactcaaatcttccgcacggaaaaccgtataatagttcttttcgaggaaaagacgttttctcttttcaggtaccccagtttcaaatgtgtattttccactcttgacattgtaatacggacaaagagctgtaccacggaaattagtcaagccacctttgctgacatccaaatgggccagacgccaacgtttcaaatcccagtaacgatgcttctcaaaagcaagttccacttttcgttcatggcgaaccttgtcaagagtcagatcaccggcagtcaacagcttgatacctgccctgccacggatctcattgatatctttcaaagccacatccaaatgctgattcaactccatacaagcctctgcacgattcaggtagatttctgccaaacggaacacaacccaaggagtagaagaacgttttgcatcaatatccgtataatccgtcagactttcgtccaaaaactttcgctgatagaaacctgttttgctggcgtcacctacacttaatgaaccaccgtctttcccggaagtattgtaagtctgtccgtcgataactaccttattttccttatccggttgagcagaagcttcatatttggttcctattccatcctgtccgttgattactccacgcatccactctattttaccaccgccatatcctttataatcagcgccaggcaagtaaacggaacctaataaacgaggatctttatttttaaagatgtcatacggactgtcgtagctaatcgcctttccaccgctatccttcatttttagtttaccttctgtaccgtcgatatattcaaattcctcaaccatttccagaaccggagacataccacatccccaaccatcaccacgatatgagaaaggaacgttcagtttatcccacatatgcccttttccggcagctacattatactgtttctgaaaaatatactctccattatcaccgttcactgtcttagaaaaaagattataaaagttctgtgccagctcttccggatccatacttgtcgacttgtacaagctatatacccgaggaaccatctcatccaaaatctttgatgaagctgtataacattcgtcaaagtaacgctccgcttctgtctccggaatataaacatagcctttggaaacggcttcccccgtcaaggtaagtgctttagagtatttggcaatagtaccggcatacaatgctgcacgagaccacaaagccaataccgccccacgattggcccgatatttggcatcgctgttgcgcacttccggcaatgatccgtagatggctttacactcattgattataaaatcatacgtagctgcttccgtatcacgagcctgatacagcgcttgcgtatttccggtggtgtattcttgaggaatagtttgcaaaggcacacctccgtaacgtttcaccaacccaaaatactgcattgcacggataaaacgagcttctgctccaatctcttctttttcatcctcactcagcactgaagtcttttcgatattcagcaggaagttatttacgatacgaatctgtttataacgagtcaccatatcgtcattaaatacataatcgccataagaataagtagaatttgatttatcaaatgcactctctttctgataactggccgtagcctcatccgaaagactggtctgattcgccaaattcgctttcttgcttccataccaatcatcaaactcatccagctttaatccggaatcatacatatccgccaaaacggctgtaattgctttcggattctgccaaattagatccggagtgttaaccccactggtactttcacgattcaggtaatcatcacatcccgtcaatccgaggatagatactccggctatccacatatatttcaaataatttctattcattgtctttatagattttagaaggttacattcacaccaaagttatatgtcttcatttgcgggtaatagcgcactccgctagagttgctttccgggtcaacattcttcatcaatccatcacgattagtgaaagtcagcagattgttgcagttgatgtaaaaacgcaaacggtcgatagctgcttttttcgtcaatgctttaggtagtgtgtaccctagctccaatgttttcagacgcagataacttgcattgtgcagtgaccatgaattaccggaacgattatccgcaacacccgctacacgagcggcaggcatatacccggaaatccacttactataaggatcggtcgggtcttcccgatgccaacggtcggtcatgatggccaatccattacccaaaccctgctggataaatgggtccaaaatatccccactgacataaatatcatgacctgccgccccctgaaagaataccgtcaggtcgaatcctttatattctccggacatattcaatccataatacatacgtggagtagcaccatgtccgagtggctgcgtatcgttatcatcaataatgccatccccattatagtcttcaaatttcagatcacctggcattaatgaacggttaccgtctttatcctgaaccggtgaattcaagatttcctcgaaactggagaactgtccgataactttctttccccaacgaatatctttataacgaccgttcgtgttattacgccaatcatcatacatattggtagaagcagctctctctacataatcatacttaatccgggtagtagagaaattagccgacacattataattgaagttaccaatccggttcttatgtccaactacgatctcaaatcccgtattaatatcagaattcagattctcctgcggcattgattctccgaaaatagtaggtaatgatcctacacgagtagcaggaagtcccgaacggtttctacggaaccaatcaaattctacggaaatcaatcctctatgataagaggcttcaaagccaatattcataatctttgattcataccaagtcagccacggattggccatacctaccgtagtcataccggaagtcactccgttgctacccataatatagctcccatgagatgtatatccatccagatattgaaaagcgtcgaagtctccttcatctcccactttggcatacgaagcacggattttcaggttgtccatatcaggcaacagtttcttgaaaaaggcctcttcggaaacacgccaccctaaagacacacctggaaaaaatccccaacgattaccttcacggaatttataggttccatcgtagcggaaattgaactcaacaagatagcgattggaaaaatcataattcaaacgccccaccagaccggcatgtgccgtttcctgtgttttaccggaggcttcctgattggttttatctccataatccaagtcaggaatgagtccgatagcaaaatcacgtgttccggtcacccaacttcttttgtcattatacatttcccataccagcatagcaccaatattgtgcttcttggcaaacgtattattatagttcattgagaactgataagtcggtttatcataattttccagtttcgattccagatgtgcggtattaatcaccttctctatatactcttcattggcataatcataagtatattccgacaaatctttcctccacgttttccattccttatttgtataatcataagcaaccaatgcttttgccatcagtcctttcacccagggaagtttccaggtaataaccaatgagctgttaaattcacgacgcagacgatcttcatatccgctgtcatccgaactggatacatgtacaggattggccatatcacctaccgctccccaataatccggattatcattggcatacatggaataagtcgggattgccatttgtgccgaacggaacagattatcgccgttataaggcttcttgcggttatcaaaccgtccgctcaaacgcaactctacgtccacccctttagcaacttctacacttaggtttgaacggacattgtaacgttggtaattccagtcgcccgaacggatgataccgccctgatccatatatccgatagacatataatatttcaccttctccgtacctcccgtcatgctcaagttgtgtgaagtttgaggagctgagctacgcatggtttcattccaccaatccgtacctgccgtaccattccggtaagcttccagctgctcttgcgagtaagcagaagctccgcgccacggattcgcattatgaatcgcttcattgtaaagtgaagcatactcataggcattcatcatttccggatagcgggtcactttctgaaaacctacgtaaccattatattctatctttgccttttgctccgttccttttttagtagtcaccaataaaaccccattagaacctttaaaaccgtaaacagctgcggcggcatccttcagtatggaaattgattcgatatcattcgggtctagttgggcataatcacgctcgataccatccacaatcaccaacatacttccatatccgcgaatatcaacagaagctccgtcatcgccagggctaccactacgttgcacggcacgcagccccggcaaacgtccggcaagcatatttgtcacactaggagcttttacctccatcaacttatccgaagagatggcagctaccgatccagtcacagaagctttcttctgaataccataacctactactaccacttcatccaacgtttccgtatcttcctgcaaagttactttcaatccggcttgtccgtttactttcacttcaaccgttttatatccgatataggatatttgcaacattccgttagccggaactgacaaagtgaacttaccatccaaatcagtaatcgttcctataccggtactccccttcaactgtaccgaagctccgataacaggttctccattggcatcaaccaccacaccctttaccgagatattccgtaccgtctgttcaacatctgatatcaaaggattttctgcatataccgtgaaaggcagacacaagaacgtccctgccattaaagctgaaacagtagctatcttcagccggtcattgaacgactttgagacaaccgtgttcattttacaaccatgtttcatagattaaattagttatgtgttttgagttttaaatccatattattatcacatatcgctactgcaacctgcgaatcagcgcaaccataatagagatatagtttatttttgaagtaagccaatccttctataaatactgttccgtctttatattgaccactcttctcaaaagcagcctcaggcacaaagaatggtttatccaaacggcccagtacttgataaggatcatcggcatcgaacaaaaactgccctgcacaataagctccagccggatattccggatctctttcttctttatatccgttcttaccattatacagtaggacaataccatctgttgtttttatggcaggaggaccacactcagtcaaacgactatcaaaatagccgctgcggggtttggcaatttctctcaattcattattctcgttcaataccggtgtccaatctgtcaggttgtcggaagttgctgcacatacggcattttccccccaatacataaaatatttgccattcactttctcaatgacaagttttccatccttcaccccggtaacaatagaagcggatttgctcgctatattggcaaaacgtccgttatacgcttttgcaaaagcaagtccatgttttgtccagttcttcaggtcggtggaagtagcaactgccagacgggggagatgacgattccaagctgtatagagcattacatataatccatcctccgtcattgccacacgcgggtcttcgcaacctccttcccattctatttctttataatcgtcttcggaagggaataatacaggggcatccgattgtttcatcgtcactccatccgtactttctgcatagccaatgcgggatgttctctttcctataccttgcgctgaattatcttctgcccgatagagtactacaatctttccatctttaacagtggctgccggattaaaagtatcactctcctcccattttaccaactgtttgcgcatcgggcattgaaaagtagtcggttgcggggaaatcaccggattcactccttccggacgaacgaaaggacctattatccaatgttcgttctgctcttcaacaacagcagatgtttgcttctgacccgagcatccggcaagtgtcatcatactaattaaatagattacagattttagttttatcatacgtcattttttagtttttccgaatcagtcgttccttgtttttctgtcagcaaaactaccctcattccacaaaaattgagtgtactatattatcaaaagggtatataggtgctgtacaacataataattcattcgtttgcaacgacgatttaacgattttgaaatattagcgaatagcttgattctgtctgatgatgttccgagctaatggataggcaatcaactgcaaagctcccaccaggatcaatgcatacttcaatgcaaaatcctgtgatatgacaaatgcgagtaccataaaaagtattagtccgaaagcacgtcccagaaatagtccgaactcatggcttaaaatataggtatattcatttcttttttcgatttttactactgcatcgatggtttgcatcataatagggtaataaggcaagtcaaacaatggctgaaagatcaccttacagaggacaaagataatcactccggtggctgaaaacaagattccgttgaacagagtaccgataaaaaagacaagtagcccagctataaataccttcggccgatcttcaggtttggttattcgtcccaatacataaaccaaaacagctgtcagtgtaccactgattccctgtattaaacccaatacgccttcatcacctactaacttcagaaccagaatagcaggagcgatcaccaaaaatccctgtaccattcctttcagggaagccagcaacaacatttttttccaaagtgtacaaaaccggaaatacagaaaatttttctgcatcggattggcgaatttaccacgccataaaacggctatagcaaacaaagtcactatgattactccaaccgtcaccaaccgataggctccattaatatcaatcaggcatcccattatttccctgccatctatctgactgataaatgctccaatcaataaaggtacagtaatcgaagtaatggaaaagaaaaaagactccagcccgaagaagtagttacgactatcatctgtcgtgttattcagagtcagcagatagcgattggtccagaagaagcccgatgcagctccaagtacaaatccggttatacccaattccacaaagcctaatgactttaccaacatcatggcaaacatcgacaatccactaactaatatccctcctgcatacagcatcttcacactcacatgtcgtaacaagaaaccattcacaaatgaggtagtgatgataccaatgtacatgaaaagctgataaagagccaccgaaaccggttcactggtatggcgcatcacataagcgcccacgaaaatctcaactacaggaagcaccaacgcataaagaagattagtcatcagcaagacccgtacattagaagtttgctgtttgaagaactgatactctctttttagtttattcattatctatcttatttatattacgactttaatgaacggagaatctctgcaatagacaactccgccccacagattacttcatcactggcaccataataaagccttatcttatctccctctaccaaatgtccgttggtgaaaattacattcccgaaaaatccggtttgttcgtaaggagcaacaggctccatgataggttctttacttcgggcaattacctttgaaggatcatttaaatcaagtagaagagctcccagacaataacggttttgatagtccgcaccatgataaatttccaaccacccttcctctgtacgaataggtgccgctcctgcacccacgcgggcacagtcccaactatcaggacgggtagttgcaatgcaacagtggttgccccaatacagtcggtcgggtgattcggcaagccaaatatagttgccacccaactctgggctactcggacgatgcagtgcaagatattttccgttcactttctcttcaaacagcgcgcaatctttattatgaggagggaaaatcatgccataacgagtatagtttttccagtcataagtatgaatcagccctacaccaacagctacagaagagacttccgtaaacgtaagataataaccatcggcagtagtggccacccggcaatcttcaatgccaaaagcctctaatgcccctttaccaaaaataggaggataatccggttcttccttgaagtgaattccgtcttcactcgataccagtcggagataagacatggtagtcagataattctgccctgcatatcctatcacacgaggatcagaagcatccagtttcgggtcattctcatcgaaagagagcacttctatttttccatctttattatatacgggaaaactaataactccctgtttctgcacaggccgttcggccactcgcagtaataaccagatttttccgtcgaaacggaacacgccgggattcaggaaacaggtgatttccataccttctattcctggttgtaagtcggagggtttcaacaatgggttttgatgaaatcgttttgcaatatccattttcagattattaaatatgtgttgtttttatttctggtgacaaagctaccctgcacaacaacggaaaaggtgtactatattctcaaaagggtatacaggtgttgtacagcatatttttatctttgttttcttatttttcctctctatctttgcgacatgattctacgaaaacactcatatttccgctacatctgcatccttatttattcatgcctgatgcctgttttattacattcccagaatgtagtgaaacagatttcgaatgcagacgggttatccaataattcagtgaattgttttctggaagattcggaacatactctctgggtaggaacatgggatgggctgaatgcctacaacggacgtagctttaaaacctattcttataataaaaaaaatgcaggatctatcagtaataatgtaatctggcaaattatcgagcaaaatgactctgtcttgtgggtatctaccgactatggtgtcaaccggtggaaacgttccacacagcaatttactccttattatttaggtacgcagaacaatccgcccaaacaagagaaatcattcctgctgggtatcacttccggcaaatacattatctgctatgtgaaggaacaaggtttattctattttgacgaccggaaacaggactttgttccattgaagaataatcttcctgatgacatcaaaaacttcgttattgattccaaagaccaagtattcttcctcacaggacatggacaattattacattatcaactatctgtccatagctctaatccagaactctcgttcaaaaaagaaatcaaacaacctgcttccatttccggcatttatctttctcaagattatcttatcattaacgatgaccgggcattaactgtttctttggacaaccgcatactgaatagcatagatattccagaaaataaaacggtttcgcaagttatctgccacaaagagtatcttctcatcagctttatcgaagggggatgtatcaggtataatctggaagataatgcttcaacggaattacctcaattaccagcgaaagcatccattttcaccatctacatcggttcgcagaatatactctgggtaggcaccgacggacaaggagtattggaagtctatgaacacagttctccattccacaccgtaaaaactgattatcccgtacgttgtttttgcgaagaagataatggtaatatactcgtgggaaccaaaggagaaggaattctgctgcttgacaaacaggaacggcaggtcgaaccttatctgtcaaccggcaatggattgatttccaattctgtctatactatccgaaaaaatatgtccggagacatatttatcggaaccgagggaacgggcatcaattatattccacttaatagcagtcaggtaaagaagttaagcattcctgctgaatatccgactttcaaagctgtatacagcattctgttcactcataacgactcactattatggttgggcacttccggctatggacttatcaaactaaccttgcaaagggaaggaaaaagttataaagtgacagaaatgaaacaatataaatctcccagaccttcctcaccaagtaataacatcatttattcggtcattgccgggtataatgaaaatgaactttggctaggcacacgaggcggcggaatcaataagttcgatatcgcatccgaatgcttccaacaaattcatgagatagactctactttatccctaaccaacaatgatatactctatctgaccaaaggagattctgccagcatttggataggcaccagttacggcctcaatcgattatttccggcagacattccgccatctattatggaatatacggatcacaacggactacccaacaatacgattcacggtattctgaaagatgaaaacggtaatatctgggcaagtaccaatcaaggtatctcttttattaatctatcttcgggaaagattaataactattcttccagaaacggattacaaaatgatgaattttccgatggagcgatttttaaggataaagcaggatggttgtatttcggaggagtcagtgggctgaattatttcgatgagaacaaaatacgtttacgggaccatattgctactctaagtttgaatagtctaaaaattaataataccagccaaaacatttcagagcgtattcttaatcatacgctccggctcgactatgacgaaccttacattacattagggttcacagcacacgactttatcaacaacgagaactgcgaatttagttatcggattattgacttcgccgatgaatggatttacaacgaaaacaactccaatatcgtcatcaccaaacttcctccggggaaatataaactggaagtaaaatgtaccaatggtgaccgtgtatggagcaatcagatctactctcttcatctggatgtcgcctatccttggtggctaagtactactgcctttattatctattttattttaattgctattgctatttatataacacagtccgtcatcaagaatcgtatccgactgaatcgccagattttactagaacatattgaaaagcaaaatcaacaacgtattcatgaatcgaagttgaacttctttacgaacgtggcacatgagttcttcactccgctaacactgatatatggtccggcacagcatctgctggaaaaagcagaccttgacagttatacgaaaaggtatatctacatcatcaagaacaatgccgaccggatgcagaaactcatcaacgaactaatggagtttcggaaagcagaagcgggacatacggctatctatgcagagaaagtagatatccagctactcgttgattatgtgtcagacaactatactgaaattgctgaagagaataaaatagactttagtttcaaaagtaaagaagtgtcgtcttttactacagaccggaatgcactggagaaaattatattcaacttattatctaacgccttcaagtatacaccgtccggaggatatatccgggctgaaataagacagaatgccactaccggaacattacatttccgtatacgcaactctggtaagggattgactgaaaagcaaacgagcgaaatattcagtcgctttaagattttcgagagcagtaacctgaagcacaccggaagtaccggagtgggtctaaacctaaccaaaagcctgactgaattattaggtggagaaatcactatagaaagtactttgggagaatatgtagaattcaatgtatccctgcctcctatgcacgtgaattccgaaaaagaaagtcagcctacagaagaagagacagaggtcagtgaaatgcttttcattcctaagcagaaagaaattaccatactgattgtagaagacgaaaagaatatccgggaactgttgaaagatattctgcttccctactatcaggttcgcgaagctgccgatggagaagaggcgctgaaagaagtagaacaaaagcaaccggacatcattatcagtgatgtgttaatgcccaaactagatggcattacactaacagatatattgaagtctgatgaacggacagctcatattccggttattcatatttctgccaaaaactctattgaagaccagatcaatgcctataatcacggaacagatttgtatatccctaaacctttccatccaagacatgtgttgagtgtggtagagaatatgattaataaatactctctgatgaaagagtatttcaaatccggccgttcctctcttattgtaagggatgggatcaccatgcacaaagaggatgaattattactgaacaagattatcaagttcattgaagataatatcgacgatgaatccatgaatccggattctcttgcagactttataggagtaagtaaagcaggattgtaccgcaaactcaaagaattgactgaaaaaacaccaagcgagtttgtccgtaccattcgtttggagtatgccgctagcctgctaaaaacaactaagctcaccgtcaccgaaattatgtataaatcaggcttctcgaacaagtcttatttctaccgggagtttgcgaaattgtacaatacatctcccaaagaatacagaagcgaacaaacagaagaaaaagatactaaataaccatttaacaataaaaagacaatgagaaaacttttgattgtattggcgctctgtggtgtgtcaattctgaatgcgcagcaactaaatgtagcctcctacaacgtacgaaacagtaatcccaacgatgccaaagcgggaaatggctgggaacggcgctgcccggtactcatccagttaatcactttccatgacttcgatatttttggagcacaggaagtgaaacataatcaactggaagacatgctcaacgctctgcctgcgtacaactacataggtgtaggacgggatgacggcaagacaaaaggagaatatgctcctattttctatcggaaagataaattcaagctactcaagtccggcaacttctggttgtcggaagacactacaaagccaaataaaggatgggatgctgcttatacccgcatctgcacgtggggaaaattcaaagacaaaaccgataagttcaaattctggttctttaatctgcacatggatcatatcggagtggtagcccgccgagaaagtgccaaactagttattagcaaaattaaggaaatgtgcggcaaagatcccgttatactgacaggtgatttcaatgtagaccaaaccagtgaaagttatcaggttcttcatgaatccggaatattatcagattcttacgaggtagctcaaatgagatatgcgactaatgggacatgtacaggctggaatccgaatacatatactccgaaccgtattgaccatattttcgtaacccccaattttactgtagagaaatacggtgtattaacagatacttatcgcaccaaaaatgaaactactggaaagtatgaatctcatataccctcagatcatttcccggtaaaagcagttctgaaatttcagaaaaaacactaattagaaaaaatcgtgaatggtagaagtgttttacccgcccctctcaaacttttttttctccggtcctactcccgtcactgtcacctttttccaatgtttgggcaatacggaaggaacctgtacaataccctcatccgtaatctgtaggccgcagaatccattgattaccgcttgaagcagcccgcctgcaccggtagcaaaataggggttattgctggttgctgtttcggctatcacaccgaaaggtgcgcgtaagttgggctcatagcaacgacgaaacatctcataagccttcttcgcatctcccattcggacatattgcacacaaaatacggagtaggacatggcaggcccatctttcggatcaatccggtcggtataatattccatatccttttcccagattttcgggtctgtgatgattcccagcggataggctaacaggttagcatcggattgttttatcatctctccgttataggtggcatgttcacgcgtcactccgttggcaaaagaaagaatacggatattcttcccgacttcaatagcgtactcatcggctcccaccacactgcgaatggaataagaaccatcctcattccgttcggcacgacttacccagaaatcggcaactgctttcatcagtggataaccatgagaacgcagccaatgcaggtcatgagtgacacaataatagttccaacaggcaatggcaatatctgctgtaatgtgatgttcgagaggtccggtcaaggcaaaagtcggagtagattcttcaccagcatcgtcactttcccaaggaaacatggcaccccggtaaccatgagtgatagcacgtttgcaagcagctgcaagacggttggtacggtagttcaccatagattcggcaatgccttgattgagcaataatataggaggatacatccaaagttccgtatcccaaaagatatgcccgttgtacccctgtgaagacagccccatgggagaaatgctcaatccggtaccctctcttccgaaagaatagaggttgaacagggcgaaacgcactgcacgttgagcatcatcatcaccctcaatacgaatatcaccttgccaaagttcattccatagttggcaatggaaagccatcagacggtcggtaccctcgtggatagcgtaagtgatttgacgttcagactcattgtaaggatctacgaagtcacgcttggaacagatgacacctgccaatgcaaaagaataggtttctccttttttcagagatacggtaaaagattattgaatggaaaaaggctctttccaggggagaagaccaatgccgccattagccataggagctcctacgtaatcagcatgaatatctgaagtatagagttgccacaagtcttcctcggaagtaacggcacgcatggccgtaaaagagcttatcaataccagaatcagtaaatttagttttctcatgtttttctatgttgatttaccacattaaatacggggtaaagataagaataactatttgaaaataatcataatctgctcatcaatacccttatcgggtatgcgcacactacatacacaggtttctttatcccaactccacgccacagattccgtatcattctctaaattatcttccaagcgttccgtcttagctttctttattttctttcctttgacagtaacctctttcggaactttcgcagaataaatacgaaacaacagatttctcggaccggggacagtgtaaccttttccttcacgggcagagacagtcaattcatatccattcgccaaagtattacaaacaatcggcgttctgacaaattcatcgcgctggtaccctaagttttctccttcatcttcataaagagtaaaagcagcctgtgcaccttcctgtgcagggaaaacttcaaaagttagtggatataccggtttctcatgggtgtagttcatcaccggcatcgtagggatgatggaaccttgcttcacaaacacaggaacgaaggacaagggagcgtcaaccgtagtccattgctctccggtgtaaaccgtcttcttgttattatagtcaatccatgtaccttcgggcaaatagacatttttggtacgagcgcctttcttcaccacaggggctaccagtaattcacggccaaacatgaattgggcatccgtagaaaatgtttccatatccattgggtattcgagaaacagaggccgcatgataggcaatcctgtatcatacgcttcgcgggcgtaagtgtagatatacggcaacaaacgatatttcaactcgatagctgcctttgcgttcttttccgcttccggtccgaaaagccacggttccaccggattatctccctcatggtggatacgactcaaaggattgaatgcaccgaattgaatccaacgggtatagagttccgccatagccggataatcttcaatgtctccacagtaaccggtaatgtcacaggaagaaaacggtatcagtcctaaaccggcggaaagcattacaggaatctgattggctaactgtccccagccttgcaacacatcatctccgttcccgctatcacctgtccaaccgaacgtataacgttgcaatccggcataagcagcacgggtcatttggaacacacgacggtccggattcctcttttcaaattgttctttcaccactttatcccaagtcaatccatagacattatggatttcatcgtgcatacccagatagtgtttcatgacgagacgttccgtttgctcttcgttactccaggcaggttcgcccatgtccgtccagaagccggagataccgtcgtcaatcggtttctgctgataggttccccaccaatcggctacggcaggcaaggtgaaatccaccactccacagttaccaccccaaggccagggcatatcgtagcttttaccgttcgtgctgtcctttacaaaataacccaaacgatcagcttcttcccattgctttttattagcttgtgcaattaccggatcttgagatactactaccttaaaacccatccctttcaaatccgaaagcatcttctttggattctcatagtttcctttgcgccattcgaaatcctgcagatattccgtccagccgatatcctgataaataatatcacaagggattccacgtttccggtaaccctcggctatttcgcgacttagcttttcgcttgtcagcagaccgcggcattgagcaaaacccagcgcccatttcggtggcatgataggtttgcccgtcagtccgacgtattggccgataatttccttataatccttgccgaaaataaaatagtagatcatttcaccgttcggagcttcaaagctgtaatagtcgcgactttccgtaccgaacttgaattccgttttgtacgtattatcaagaaaaataccataccgataactgctcataaagaaaggaatactcttgtagagcggatcttccactatactgtaacagggtttgtcactattccacatcttataagattcgccacgacggtccatctttcctgtcttttctcccagtccgaaaaaatgctcgtcacgacggagcactttatattccgtcttctttgttccttcactcacatgccccttgtcggcataatcactaaacaggagtttctgatacttatcaaatatctgaagactcaacggagatttatttacccgaatacgcaatttcggagtaaagatctcataacaggccgcctgttcgtccacatggacggtccctacatcttccaactcttcattaatcactgcaaaagaggcattcttccgttgcagctgtccatcgggcgaaaaccaaactttgactaccgaaggactacagagctgtagctgcaacgcagcactgtccgtcaggtgaaaagtcacctgacgcccttgttgtgtaaaagaagtgcatacctttgcgttatctgtggcacaaagcacagagataggtaacaaacaagctatcatccatcctattattctattcatattcgcactatcctcttatttattccatatctatcagcctcattcatactctactaccaacattgtccaatatttcaatgacggaagtgctacctttatctcatttccttcctgaacgaaatcaagctcttgagagactccgaaacgtgcatccggagaggctgcccaaactgttcttaccgtcccctttacgcttacctttgtttggaccgattcaatcaaagagggttcaacctgcgtcccattagagtcacaccaatccaaatgtacagcattggtataattaaggaaatgaatcacgtccctacgatcaaagcgtttcccgatagtggcaatctgattacggacagggggccattgattgacggtcatcttcccatctgtagaagaagctgtaactccataaaactctccaccatcacgtaagagattctcatacccggtgataaaatcataataagtcaccattgctttcttcaattcccctttcattgccaagctgctgttagggaaatactcggtagtcaacatatgttctcctaattccagatgcgcaccaccccatgcatggatagcggcatttgccattaatacaccaggggtattgaaatagccacgcccttcaccgccaagcttataattcatataagcagccaatacagttttctttccgttcgaccatcgatcattgtttgtgataatatttgaaaggacgctaaagccgttatcggtcggtttttcccacacttcagtataaaggaaatctaccggagagttcgcaatcaagttttcttgaccatattgtcccacagcattcatcaccaacgactttttcggttgagcttctttcatcgcctttataaacaccgggaaagtagctgcgagatcaacagagtttccattataatcatataattctccccgaccacctaactggtcaatctgatagccgtcaaaatcaaaaacttcatatacgtcgttattctgctgagccatatagtctctccattcctgcaatgccggattcgtcagatagatattacttttgaaaggagaacctagcggatgataatccttgtttccgtgcttcttgtccttaaacaggtaccatgcttctttcacgccatcatcggccgcatcgctcaaagctccataagcaagattgtagaaaagagatttcataccccgtttatgaccagcgtcaatgtacccctgcacagtagaacgataacaatcgcgattgataatatctttccacacatccatcggagcagaaggcgaacctgctaatggcttatggtgtttgtagtgccagtcctgatactgcacatagttgatatgatggcggttcaggttatccattaccttgttaatctccttttcgctcattttgccatattcggagagaaatccgttgcgcggaaagcgtgctggatcggaagatacatcaatggcaatgctgctcagaacaacctcttcgccattctctactgtatataagtcgaccatataacctttaaagtcatctgtcggcggattccaactccatgactttccggtgaggggagtttcggaaagcaccttgttgaggtgcttatagcgaatggtcacctgcccttcgggaagattgttcaaagaaagttgtaccggttctcccggctgataggcggctttatcggtagacagcagtacggtgatatagccgtctccgtaagtaataggattgttcgaaggctcgtcgtcgatacaaccggccaatgaaaaagccaggatacaagccattatatatttcgtcagtttcataattcaatctgtattaattattagttatttcaatatccagtgtactcaggttcaatcttatccgatagttaccatgctcaatattgaacttattttcatccccatcatgttctccttcatttataagaatcaatttattttcagcatttccgtctttaccaaacgaaggataaaaattactctgttgggtcacaaatttaagttgtcctgttttaagttctccttcccaaacaaagctattccgttcatcagctatcggagtcatcttcgttgcatcgtccaatgaccaaccgcccgtagtagccgaaccaatcatccaaagattaggataaaccatctctccgcccaaatccgtaatctcaatatccaatgtgcttagattcagttttatccgatagttacccggagtgcttatcataaacttctcatccggttcgtcatcactttccctatatacaagtttattctcatcttcaccatccttattaaaagaaggaacaaaagaagttttctgtaagacgaatttcagttctcctgaaagaagcacgccttcccaaacaaatccgttcggttcatcctcaattgattccatcggagtagcattatccagactccatcctcctacagttgctccaccaatcatccacagattcagataacgttctatataaggtgtcagtttgaatgtaacgacaggagaaacctgagtaaactcttcatgccccaatacagcagcagtcacacgagcttcaaactccaatgtttcatccaaagaactattccacacttctgccaacaagtcattcatctctttatggttaaatgccagaatacgggaatccgttgcacctatatcctttttcagtcctcctgcgaaattgttacctttcaaatccatttcaagaacatagctgatacgggaatctgttccatagttactaccagcagtccaagcaaaatgaaaagcttccctatcactcatcaactggtccagttccactacttcggacgatacagacaataccaaagactcacttcctttatctgtctccatctcatcagaagtacacgaattaaatacaaagcccgccaataaagccgtcagagcaatatatatctttgttttcataatctttcttttttactattaatatcccggattctgtttcaaattgccattcgcctcaatctctttcaacggtataggcattaacaaatgtttttccgccgcattggtttttccgatagagtgaaggaatttcagagcatagttgtctttcaggcgaaccaaatcaaaccaacggtctccttcaaacgccaactctatacgacgttcctgaataattttctcccgcatctgatcctgtgtcaatccttcgatatccgcccggttagtcagtcctgcccgttttctaacctcgtacaaaggggcttccgcatcagttgtcaaagcttgttcattcaacgcttccgctttcatcagtagcacatccgcataacggagtaccacaaagttggccggactggtattgtaatccatagagatggatttcgggaccagaaacttacgcaaattgtatcccgttgtagaataagaagactgatattgctttccgtcaaagtcaggacatcccaaataaagaatagtcttatctttacgattatccccttcttcgtactggctgacaaactcggcagtcggctggttccatccgtagccgcccgccaccatatccgaattacgagggccggtaaacgcactcaaccaagaagattggttttcattactccagaaatcataattggtcttaccataatactgtacctcaaacagtgattcaggtccatttttcttattcggattaaagttatcactataatcatcattcaaacgataacccaatttctgtatttcctcacaaagacgtacaatctccgcatactcctttctttgggtcagatacactttggctagcaaccccatcgctgctcctttagaagcacgtcccaaatcggaagcggaataagaagatttatccggaagcaagttgatcgcttctttcagatcatcttctatcaacttatagatttcttctttcgaagcacggaaaggtttcaaatcatcttccgaagtctgcggttccgtcagtaaaggtactcctccaaaaagacgaaccagaataaaataataatgggcacgcaagaatttagcttctcccaaacaacggtttttcaaactttgatcaatattcatacccggaacgttcttaataacgaagttgcaacggagaatacccggagacggaccgcgccatacatcaagcacaccggcattatcggtggtggttatgaagttagccatatcggtagtctctatgccatccgtacctccacctgcaccgacaatactgttaccggctacgatatccagtgtccacatacgcatattatataatttgggccattgaagcggttgataagcaccatttacggcagctatcgcatcttccgctgcctgaaaactcttggaagtatcgatagagtcccacggttctttatcaaggaaaccattacagctgctcaatgtcaagcccaacaggaagcaaggaagtatatatctgaactttttcatatttgtcaatcaattaaaggttctatataaaagtagttagaaagaaacagatgcgccgaacgtgatgttacgggctatgggatacacgttattgtcatttcccgatccggaaatttccggatcaagccccgtataacgggttaatgtcagtagattctgccccgaaacgaagaagcgcacagaagacatcgccgccttcttgctccatgcggccggtaaggtgtagcccaatgtcacattcttcagacgcaagtatttaccgtcttctataaaacgatttgaaacacgcccgttcttattcgggtcaccgaatacagcacgtggcatactgttgcttgttccttcgccacgccaacgatcgagaacggtcgtcatctggttctgtgctacggacatggcttccaaagaggcccgatttgcgttgtatatcttgtttcccgccgccccttgcaggaagatttccagatcgaaacctttccaggcaaatgaattgttcattgaaaaaatccatgtcggagtgggactgccgagataagtacggtctttatcattgatgattccgtcgttattcaagtccttaaacttaatatcaccggcagaagtacggttgtaagggtcattgccttgcgtctgaatggcgtagcggtctacttcctcctgtgtctggaaaataccgttcgtcacataaccgtaaaaagaactgaccggatgaccgactgcatgaatattattatcgaaatacatcgggacatccccattcaagcggataatttcattcttgttgtaagaagcattgagagacgtattccatgaaaattcacccaccagattacgggaactgacagaaacctcaaatcccttattccgcatcttacccgcattgatcttaggaacattgatatccgaatacccggtagagataggcactaccatatctaccagcatatcgttcgtattcttgatataagcatccagactaagattgatccgaccgtcaatcattgtcaggtcggcaccgacattatattgctccacctcttcccagcgaacattcgggtttggcattaccgacggggcaatggcattcacttgcgtaccattgaagttatactgaatagtctggatggtggaagcatacgcataattacccacactcgcctgattaccggtcaatccatatcccgcacggagtttcacatcactcaaccagaaactctttttaaagaaaggttcctcagaaagcctccaggcaagagatacggacgggaaattagaccaccggttctttttgctgaaacgggaagaaccgtcacgccggatcgtagctgtcaacaggtatttattatcgtatgtataattgacacgccctaaataagagagcaatgcccagtcacttccatttccgttcacagtcggttcgagcgtaccattatccaattgctgcgcagtaggactgatgaatcccataatggaaccgcccaaatactcatacgtgttactctgtgcagaagaacctaccatcacagtcagttgatgtttctctgcaaacgtcttattaaaagtcagagtattgtcccacaataaagtaaggcttttgttatacttccgggaagcatacgattccggttgggaaatcggctgccagtcatacttgggcgaccagcctttatcatcccaaaagagtgcctgtactccaacaatagttttgaaagtcagccattcccacggttttacttcggcgtagatattacccaatatattgaaacctttagtagcagtagagttggtcatcatcttgccgataggattagcaatatctcctacatacatcggaagccctacaggacctgcccaagaaccatcatcattcttgatagcctgtgtaggcagtgccaacatggtatttttaatactatactcgcccttctttttaatatcatgattcagcgaaagtttgtttcccatctttaaccaattattcatctgtgtatccatattgaattgcaccgtataacgctcatattgagtggtacgtacaataccttcctggttgaaataagccgcagatacataataagtcgttttatcattcccaccggaatagttcagtgaatagttctggatagcggcagtctgaaacaattcatctgtccagtttgttcctctgcccaatgaagtaggatcttcaaacagagggttctgcggttgaccgttagctgtcatcatttcattatggagggaagcaaattgagtagcatccagcaaatcaagtgtacggatagccttttcgataccgtaagaagccttaaagttaaagtgagcggcgtccgatttccctttcttcgtggtaataataatgaccccgtaagctcctcgcgaaccgtaaatagcagtagcggaagcgtctttcaacacgtctaccgtctccacatcatccatattaatcatattcaaaggaacatccgtcggcaccccgtcgatgacaagcaacggatcactattgttgatggaaccgataccacgtatcttcattgacacattatcgcccggcgcaccactggaaattacctgaagcccggttgcacgtccttgtaaagctgctcccaaactaggagagggttgtttcatcagatctttggaagaaacggaagagatagccccagtcaagtcactcttcttcatcgtaccataaccgatgacaacgacttcatcgagcacctcggtatcttctttcaaagtaatagtcagggacgttttgccattcaccggaactgtctgagtggcatatccgataaaagaaacggttagcatacttttaggggacactttcagggagaagttaccgtctatatcggtaatcgtaccgttcgtcgtactttcttctactacactggcaccgatcaccggctcacccgcagcatccactacatgtccttttatggaaatctgttgtgcgaatgcactaagagataggaacaagccccacattattaataagaggcggcgttcaaagcctttcgacttcatactctgtttcatgtacattaatttaaagttaatattagggttacttttgtttttactctctgtgtcattgctgaaatgactacgaaacaaaagtatctacattttatactgttccttaaagcagatagcaaaaatatagtgatttgcatagtaaacaactatataaatcactaataattagattattaaaaaatagtatactaactaaaaaagtagtggttttcttactcttccaccttccctattttcattactttagcctcaaattcatctctttctcccaaagctttgttacggacacgggtccggtaattataaatggtagtcacggaataacggaggaattgcgctatcttggtactgtccgtaatccccagccggataagggcaaagatacggagttcggtgttcaacagttctcccggtttgggttgcatgggttcggtaagcagcgcattaaattcttccacaaaattggggaagagttgcaggaaagtcatgtcgaagttcgcataaaactctttcagttcttcgtcaaggaattgggaagatttaatggctttatatagttcttccactcttccggcagcagcaattttattcagggaacgacggtataaatccatcttgtcgagataagtggagcattggtccatatatcggccgatatattcctccttgatatagttggcttccgaaagcgtatggttcatctctttcagttgcgaattggagtcgtgaagttcttcgttcagttcttgcaacaacgtattggtatcgaccacttcgcgacgtgcggcagcaacctttttcatctgcttgtaaacgaagaaaatggcaaccaacaaaaatacggaaagcaaactgatacaaatcaatgatactttcatctcctgttgctgccgtttggttttcaattggtaagcctggtcaatgataggaaagacttgcgagatttctaacgtacgaaggcgggcattacaaagagtggcatcctctaaggagcatttcaggtaattgtaagcacggtcaatatccccttcatcgtagacaagggaagcgagtttgcgcaaagatacatattcctttactgccgatttcaggtcggcaatggccgaaagggccaggtaatgcttttgtccttgtttgtcgcctttcaaccggtaaccctcggagagagtataagtaagcattgcttttgaatggtcatccaaagaaggtttgttgtaatattccatcagcatacggatggcttcatcgtattgagcatgtacgatgcacttatccgccatcaccaatacgtgccccagagagtcggaagcgttgacctgcagaagagagtcacgatacagatccgtcattcgataatactctttcttgactttctccgtaacggcataatctcccatcaatccgtaaatagtgcgatacaagtgataatagtaaccatagagataatcgggcagcgttttcttatcaatctgccccaatagttccaacgcttctttatacattccggtagttcccatcacttccgccatattcatggcagcatcatccagataatccagtttatccatgcgatgcgccagttcctctttccgttgagcatagacaaaagacgaatccagattataagcccggtattcatcgaaaagacgtccgcaaaaaccatatcgttgttcatcggaagtagcctccgccaataatctcttcaggtcagcgatacgcgcctccttttccactccataagtccgacggtttttgatgagaccgtcaatctcacggagtaacgcatccgtactcttgttattttttgcacaaagcaggccggggaaggcgattgccagaagaatcaaaattacttttttcatagtgccgtatgtattatagttgcaaagataaaagtctttcagaaacttccggctttcaggagaaaattattgcaggcgggaagaacaatctttattaaaaagagagaacaaaacagatttattataaacattattcggctaatgacataaaaaagtacgaaggtttatattcatcactctggtgcatcaacactccaactttctttccctttctttgttctttctgcgggaatatgctacttttaatctcatgaatatgagaactaaagaaaggaacaaattatggaagaagtcatatagaaatttatgacaagcacccattaaacaaccgttgtacaactgttatacttccattatcccataaccatttgtacattaacgtgccgatattgttaacttcctacggccgtggtgacttcttcccacagtcgtgacgagttcctaccacagccgtgggaagatcttgtcacggccgtgacgcactaaagataccggtactttagtggaattataccggcatcctaacgtaactataccagtatcccaacataagtataccagctactctccccataaagtcccacttgattaatcttaaaacaaggcatttgacaagaaatcaaggctgacaataaaaatgcatatcttttactttcaacctattatcagcatctattgtcatgcagtataaaattggtattcaaccacttaaatatcatcctgacagattgacaataaaaagagcacaaatcgttaagtattagttaaacaaaataagacgattgttcatttctacatctttgtagaccaattcagttttattcttttaatccttataccatttcgagttccttgttgcatacccctaagagaaaaactgtacaaattgatttaaatcaaaatcatccggtctgaactcaccttgaaagattttgttttacctttgcagccgaaataaaaaagcggcaaaaaataaaggtaaaaagtaacaggtattaggtagggtttcgtatgaagaagagtcttattgcattggcgttcggcacactgggattgggtattgccgaatttgtaatgatgggaatattgcccgatgtggcaaaagatctaggtatcagtatcccgactgcgggacatttcatttcggcatacgctttgggcgtatgtgttggcgcacctgtattgacattggcccgtaaatacccgttgaaacacattctgttagtactggttaccttgattatgataggtaatatctgcgcggcaatggcccccaattattgggtattgctaattgcccgtttcatctccgggcttcctcatggtgcctatttcggagtaggttctatcgttgcggaaagactggccgataaaggaaaaggttcggaagccgtttcgatcatgattgccggaatgaccattgccaatcttttcggtgtacccttgggaacttctctaagtaccatgctctcctggcgtgtcactttcctgttggtaggaatctggggaatcgttatcctatattatatctggcgctgggttccccacgtagaaggactggaagatacaggtttcaaaggacaattccgtttccttaaaactccggctccgtggctgattcttggcgctacggcactaggtaatggcggtgtattctgctggtatagctacatcaatccgatgcttaccaatgtgtccggcttctccgctgaaagcattacgcccttaatgatccttgccggcttcggtatggtgatgggaaacctgattagcggacgtctctccgaccgttacacccccggaaaagtagggactgccgcacaagcacttatctgtattatgttattgctcatcttcttcctttctccctataaatgggcagcagccctgttgatgtgcctttgtacggcaggattgttcgcagtatccagtccggagcagatattaattatccgcgtatcaaaaggaggagaaatgctgggagcagcctgcgtacaggttgccttcaatctgggaaatgccattggcgcatacgcaggcggactcgcagtcaacgaaggataccgctaccctgccctgacaggcgtaccgtttgcactgatcggatttactttgttcttgattttttataagaaataccaggcaaaatactaaaaaacactatcagcctgatacaccctttcctcttatattcaagaagaaaatagacttcatattacaattatcgcatatataatgtttatatttgcccggaatagacattgcatcctttttccgctatgaaaacaaaaaacattttatatgccatcatcgggctgctcctgtcgaccttttggacagagagtaccgcccaaaaaacttattactatttccgtacgctggacatcaaggacgggctttcgcataacactgtgaataccatcctgcaagaccggcaaggctttatgtggtttggcacaaaagacggcttgaacctatatgacggccttgtattccgcaccttccagaaagaaaactcttcattaggcaacaacttcatcaccgccctgcacgaagatgccgaaggaaatatctgggtagggactgatgcgggcgtctacatctacaatccccggttagaaaaattcacctcgttcgatattcctattgaagatacaggcaggactatcaaccgcaccataacatggatagactccgaccctcagaaaaacgtatggattgcgtccgattcccaaggactcttccattacgacaaaaagcggaatagcctgaaagagcattcggcgaaaataggcaatggagcactcaatatcaccctcttctggttcgaggacaacgaactatgggtaagccgctatgaagacaacctgtatcattcgggagacgctgcccactttaccactttccgggatgccgaaggagaagagccattcaaaggaactgtcatcaatacttgtgtcaaagggttgcacaactgtatttacataggttcatccaacggactggcggaaatcaacctgaccacccgcaaagtacgccgcctgttaaacgactacgtacgcaacatctgcctgcgttcggacacggagctatgggtaggtacggaacaaggcatctacatctacaacctggaaaccgacaaatatatccatctcaccacctcagagtccgacgaccgctacgcattatccgacaacgccatctataccatcttcaaagaccgtgaaggcgggatgtggataggctcatacttcgggggcgtcaactattatcctcaccaatatacttacttcgagaagtattatcctcgggacgacatgcgatacctgggacaccgcatacgtgaattctgcggaagcaatgacggtacgatatggttcggcacagaagacaagggacttttccatttcaatcccgccgacggtacggtcacgcctttccgccaccctgccctataccacaacatccacggattatgcatcgacggcgactacctgtgggtaggtactttttccggcgggctgaaccgcatccatctccgcacccgggaagtgaggcactacgaaaagggcgaggcgtccaataccctcaacgccgacaacatattctcaatctataaaagcagcaccggcgaactatggataggtacgacttcggggctgttgcgttacaaccgaaagacagacgacttcacacgcatccccgaaatgaacaaaatattcgtgtacaatatactggaagactgccacggcaaattgtggctggctacctattccgacggcgtgttctgctacgacctgccacaagacaaatggaaacaatatacccgaaaccccgataacccgaactctttaccctataacaaggtaataagcatcttcgaggacagccgcaagcagctttggttcatgacacaaggagcgggattctgccgcttccgccccgaaacggacgatttcatccgctacgatatgtcgcaaggcttccccggaaacaccgtatataaaatgttggaagacaacaacggactgttgtggctcactaccaacaaagggctggtatccttccatgccgaaacaggcactaagcatctgtacactactgccaacggtctattgagcaaccagttcaattaccagtcgggatacaaagacaagacaggaactatctacctgggtagcgtcaacgggtttatctctttcaatcctgccacattcactgtgaacaaacagatttcaccgttggtactgaccgacttccaccaattcaacaaacgcctgccaataggcgaagcatcttctcccctgtcagaaagcatcaccctctcggaatccatcgaactgaacgctgaccaaaacactttttccttacgggcagcagtgctgaactaccaggctcctttatcgaacaccatactctacaaactcgaaggctttgataaagaatggtactccaccaacgggctcaatacccgcatcagttactccaacctgccttccggtcattacacgctgcgagtgcgcggagccaacagcgacggtgtctggaacccacaggaacgattattgaaaatacgcgtccatccacccttctacctgtcatggatggcatacgtcatctacttcattctgttggcaaccgttgtcacatatataatctgttatttccgcaaacgcaacctgcgcaagcaccggcaagccatggaaatattggaatacgagaaagagcgcgaactctacacgtccaagattaacttcttcaccaacgtagcccatgagatacgcacaccgctgacacttatcaaaagcccattggaacacgtcttggtttccgaccatgtgaacgatgccatcaaagaggatttggaaattatggatttgaacaccaaccggctgcttgacctcgtaaaccaactgctcgatttccgaaagaccgaaaccaaggggttccacctcaactttatggcatacaacctttccgaaatcctgcagaaaacctataaacgcttcattccgctggcacgagagaaaggattcgaattcaccataaacgtccccgacaacctgtatgcagccatcgacaaggaaggatttacaaagatagtcagcaacctcttcactaacgccatcaaatacggcaaaagtcgtatccacgtcgaaatgaagcagaacgaggagaacgaaaccttacaactttccgtcacgaacgacggtgagattgtcccgcttaccatgcgcgaggaaatattcaagccttttatacaatataagggaaacagttcctaccaagtgccgggaaccggcatcggactggctttggcacgctcgcttgccgaactgcacggcggaaagctcaccatggacgatgcagcggactgtaaccactttatcctgacgcttcccttgcaccaggcacaaaccgtccatctgctgcccaccgaaccggaaaaagctgaaagagaagaggtgatcgtttccagcgaaccgggtaatcctgccacttctacacaattccgctataccctattagtagtggaagacaatgcggaaatgaacaaatttctcgtcaggcaactgtccgaatcctataaagtgctgaccgccgccaatggcgtggaagctttgaaaatattgcaggaatctatcatcaatctgattatatccgatgtgatgatgcccgaaatggacggcttggaactctgcgataccgtaaagacagaactggactacagccatattcccatcatcctgcttaccgccaagaccactttgcaatccaggatagacggactgaaagccggtgcagacgcctacatagagaaacctttctcgatggagtacctgaaagtgagcatctccagcctgctcaaaaaccgggagcaactgcaggctacgttcatgcactctcctttcacccccaccaacaacatggtcatcagcaaagccgatgaagaatttctgaagaaactgaacaaccttatccagaccaatatgcagaatcccgaattcagcctgatagacatggcagaccagttgtgtatgagccgctccagcctgaaccgcaaaatcaaggggcttctcgacctgacgcccaacgactatctccgcatcgagcgtctgaagaaagctgcccaactattgaaagaaggaagttgcaaaattaatgaagtgtgttacatggtaggcttcaatactccgtcctattttgcgaaatgtttccagaaacaattcggggtactgcccaaagaattcatcacgacataacccgccctgcaacaaaagaaccacaaaatagaacaattcttccatcttgcccccgggaacggggtttttgagcgttttgttccatactttgctcgtattgttgttgcctgcaatgcctatttgccatagatttgcagtgctagaacaaatttgtcaaagccaataatgttaaattataactttaaatcttatgaaaggtagagcaaaatcttttattagttcactcttctgtttcggtctgggcattatccccgtcatggctgatgccggtgcaaaccataccggcaacactcttcaggtgacgcagcaggcgaaacgttcactttcgggaacagttacggacgccgccaccggagagccccttatcggagtaagcatcctggtgaaaggaacccagggcggaactatcaccgataccaacggtaacttctcattgcctgtaaacaatggcgatatactcgaagtctcctatataggctataagaaagaaagcatcgtcgtcaaagggcagcagacgctgaacatcgctatgcagaccgacagcgaaatattggaagaagtagtcgtcgtgggctacggttcgcagaaaaaggtgaacctcaccggttccgttgccacggtagacttcaacgacaagactttatcacgccctgtaactaccgtttcatcggctttatcgggtatggcggcaggtttgaacgtgatgcagaccaccagcaaaccgaactccgagagctccagtgtcctgatacgcggtaacggaactttgaacgattccagtcctctgatactggtagacgggatggaaatgcctctcaacgaaatcaacccgaacgacatcgccactatttccgtcctcaaagatgccgcctcttgtgccatctacggtaaccgtggtgcgaacggtgttattctggtaacgaccaaacgcggaagcgacggcaaaatcaacgtcacctactccggcaagttctcttacaacacccctgccaacctcatccacatggttgccaactacgctaactatatggaactgatgaacgaggcatccatcaactcgggacaaacacagattttcaacggaagtactatcaaaaaatggcgggaagcagacaaaaatcccaacgggctgtccgaatccggttatcccaactacgtagcttaccccaacaccgactggtatgacgaagtgtacaacccgaaactgatgcaggaacactccattaccgtctccggtgccgaaaagcgcacaacgtacagcctcagtgccacttttctaaacaatccgggactggtggagaacgccggcatgaagaaatattatgtgcgcagcgacatcgaatctcgcatcaccgacttcctcactgtaggtatgcgtgcatggggttaccataccgaccaggaacgtaacgacgtagacaacttgaacggcttgcagatgcaaaaaagcataccgggtatttatccccgctatgacggcaaatacggtgtacccgaagcaacggaagaagacccatccgccagcaaccccgtatacttcatcaacaacgcggaaggctactacaaacagacgaagttcttcgtcaacccgtatgtaaaggtcaatttcctgaaacacttcaccgcaagttacaatttctactacgaccacttcagaaacgagcataaatggaacagttccgactatcgcgaacagttcagtttccaagcgggagaggtaaaaaacgctccgcccacttccgacgccctgcaagaatatcacgtagcgttatggtacgacggcgaccaaagctggaaaagctccaccgtactcaactactcgcaaatgttcggcaagaaacacgatgtaagcgccatgataggttatgaagagtaccgcaaatggcgttccaccaccgacattgataagaaaggcatggtagacaccagccttacggatttcgacgccctgaccgacccgagatatatcaaaggttccaccacggaattcgcttcacgttccgtattcggacgcgccacctacgcttatgactcacgctacctgttggaagctaatatgcgttacgacggttcttcacgcttcgcccccgaaagccgttggggattattcccctcgttctctgccggctggcgtctctccgaggaacgtttcgtcaagaaactcggctggttcgacaacttgaaattacgtgcctcatggggacagctaggcaacaactccatcggcaactacgaatggcaggcggtttatgccgccacacaatatgtcttcggcaataagaaagtatccggactgggcatgtcttctttctccaactacgacttggaatgggaaacgacctcaatcaccgacttcggactcgatttcagcgtactgaacagtcgtctgaccggtacaatcgactactataacaaagtgacggacggtattctctacaatcctacgctttcacctacgttgagctacttcggctctccccgccagaatatcgccgaagtcaccaaccggggattcgaggttaccttaggctggcaagaccacatcaaggacttcacttacggtgtgtccgccaacttctcgttcaacaaaaacgaagtcagcaaatataaaggaaaattggtacgtgaatggaaacaggacgctaacggcaaatggacgtaccacaccaacttgggtgaagtctccaccggtggcaatgaacgtatcgtggaagggcatatgataaacgaatactacgtgctgaatctctacaaaggtacgggaaattccttcaacacagacggtacggtcaaccctgtcggcggccccaccgatggcatgatacgcaccgaagaagacatgaaatggctgaaagccatgatgaccgccggctaccaattctaccccaaacaaggagtaggcaaagataaaatctggtatggcgacatcatctacgatgacctcgacggtgacggcgtgtatggtgacgatgacgaccgtgctttccagggatactccagaacaccgaaatattacttcggtctccagatgaacgcagcatggaaaggattcgacctctccatgaactggagcggtgccgccggatttaaaatcaactggtacgagaaagcacagaacagttcgattgtcacctacggatacggcatcggcagggaagtggcttacgaccactacttctacgacccggagaatccggatgacccccgcaccaacctcacgtcgaaaacgccccgtctaactaccgaccaggccggacaagtgagcacggcaagcgcctggcatctgcacaacggcaattacctgaaactgaagaacctgaccatcggctacaccttcccaaagacgtgggtaaagaaagcttatatgcagaatgtccgcctctatgcttccggtgaaaacctgttcaccatcaccaagttcaagggtatggaccctgagatgatgtgcggcgtgggatatgccccgatgcgccaatacgctttcggtattaatgttacattctaaaagaagactcagatgaaaaagatgataataaaaaatatgatggcggcagcctcggttgcactcgttatgggcggttcgctgactgcatgtgtagacttggatctctccccgaataatgctccgtccgaagggaatgtatggaacagcgccagcatggcggaacagaccattgccggggtttacaaccgcctctacgaagattacaccgccgaccccaacaaaggatggttcgatatgtggtcgagcatcatggacatcgacgccaactggacggcaggctaccacttcctgcatgccaacaatacacctactagtgacttcggtagcgaacgctggtggaaaaactactactccggcatcttgcgcgccaacgatgtaataaccaacctgcccaccgtagcaggtatcagcgaggccaaaaagtcacgttacgtatccgaatgcaagtttctgcgctcctggtggtattaccgccttaatatcctctacggcggggtgccctactacaccgaaccggtaaagagtatcgacggcgccaagaaagcacgttccacacaagatgaaatctgggattacctgattcaagacctgacttcctgcattgacgaccccaacctgccgaacaaatacggagccgacagcgaagactacggacacgtcaccaaaggagcagcctatgccctgagaggtaaagtctatatgtggaagaaggagtggaaaaaagctgccgacgatttcgaggaagtaagcaaatgcggctacaagctatatacaaacggatccgatgcctacaaacaactgttcaaggctgccaacgagcgttgcgacgaaatgatattctccttgcagtgcatcaacgaagagggattcggcggtatcaagaaccgcggttacggcaaccggtgccttccgcccgacaatgaaggtaaaggtttgggatggaacaattacgtcatcaacccacagtttgtagactcttacgagaacaaggacggaagcccgttcaactgggacgacattatccccggctacagcgccatgagcacgaacgcccgccaagtctacttcctgcgcaacgaaatcaatgctaccgagcgtgccaatgccgaagcgtcgggagccgacatgacccaatacaagaattccggcaatgaagagcggattaaagccgcttatgccaaccgcgaccctcgcctcggattctccgtcatcactccttattctacctttataggtggcatcgaaggagaggcactgccctacgtcatgcgttttccctaccgttcgagaggaagaggtacgcaggacatcgaaacggacacaaactccaagatgtactacctgaaccgcaaattcgtgggtgaaggcacagaaacaatgacctactattccgagatagacctccccttcatccgctacgcggacgtattgctgaattgggcggaagccttgaacgaactcaatgatatcggcggagccgtcagcaaagtgaacgatgtgcgcaaccgtgccggagtagctcccttgaactccaacgcctacaccaccgtcaacggtaaagaagatatgcaccgccgcatcatgaacgaacgccattgggaactggtaggcgaagatgttatctatttcgacgaaatacgctggggcacctggaaggacttgaagttctacaccgacaaggaaggacgtatgaacggcatgcgccaagtttggggaagtccgacctactcctacacctggggcggcaacaactactggacattgcccattcctgcccgcgaaatacagatgaatcccaatatggaacagaacgaaggctggaaataacaagagaaagaaactgaaacgttttaatcgaaattatgagtaaaacaatcatttaccctttaaaaagaattatcatgaaaaagttattcatactacctctgttgctcgccagttttatcgtaactgcctgtgtagaggatgattctatcgtgaagcccggcgaaagtctggtcgaaccgctgaacatcacactctctctgtcacaatcgggagagagacaagtagacctgaacaagacccgcccctctttttctttcaagatagaaaagagccatcctttcgtagaaacaaccgcctcgctctcagtgataagtgcggaagaactgggtaacggttacctgccactggcggacaatctataccgtatcagcagcaccgaactggagtttgccgaagatgagcagtcacaatcggtcaacattctcttcaccaaccttgagcaactggaacccgctacgaattatgcgctggggttgaaactcacttcttcgagcacaagaatagaagtacccgccggacaagaacgcctcatcctgatactgaatgtcggtgaagggggtacgctccggaatccataccgtctacgcacgctggacgacttgaaaggcatgggcagtttgctgaaacccaatgtcaccgtctgtttcaagatggaagaagacatcgacatgcaagccgaagagtggactccgcttaacagggacggaagattccacatcaacttcgacggaaacaatcatacgataagtaacctgaaatgtacacaaggcaaattcccgagcttcttcggacagttagtcggcagttgcaggaacgtgactttcaagaatgtggaaatcagcggttaccagacacccaccggggctattgccggatttatccctaacggggctgcggataccgaaatcagcaatacacatgtgattaacggcacattcaaccaagtggaaaacggaagagaccattggagcacaggctcggtaggcggtatcgtaggagatatgcgcgccggcagaatcagcgaatgttcggcaaaggtcgacatcacgggcgaatggtgtacaggcggactggcaggccagttagtggaagctactatagagaagagcttctatgaaggaactgtttactcccggtatagcgcaggcggtatagcaggcagtgttcacggtgcacttatctccgactgttacagccacggaagtgtttctacactgtcatcattcgatggagaatttactggtcccgcaggaggtattgcagcacgtatgtatgtcggcagcaatgtgcgcaactgttactccaccgccactgtgaaaggtcatgcaagtgcaggcggcattgccggacaatgccaactcggagaaggaagcgcggacaacagcaactacatcgtcaattgcgtcgcctggaatgactatatttcttctaccaccgacatcgcatcgggacgtatctgcggatggatgccccgaggcaacgggacgaacggcaacaaaggcgagtcctgctatgccaaagaggtagacgtgatagtaaaaggcaatccgctggcaggtgacgatatccgcccttcggcaagcttcgacactacccatgccaactctctcagataccacggcctgatagccaccgacctgatagatgtcacccaaaacacgttgggatggagcatggagatatgggacttctccggagagaaaccgcaattcaactggcaatcgacagccaactaaccttatgaaatttaaaagtaatcattcaataggaggaaatagaatatgagactattacattttttaatcggagcaatggtattgattgccaccggatgcgcacaagactctgaaggcatttacaacggagcgtcacaatacagggacgaaatcttcctggcagaccctaccatcctcagagagggtgacatgtactacttgacaggaacaggcaaccagcaacagcaaggttttgtcctgctggaatctgccgacctgaaaagctggcacacagtggagaacaacgaatttgtcctgaagaaaggtgaccagacctacggaaccgaaggtttctgggctccccaatggttcaaagcgcaagaccgttactacttcctctacaccgccaacgaacaaaccgtaatggcatctgccgactcttggaaaggtcctttccgccagacagatataaagccgatagacagaagccagaagaatatcgaccccttcctgttccgcgatgatgacggcaagtattacttgtaccacgtgcgcttcggtaacggaaactttatatgggtagcagagttcaacctcgccaaaggtgaaatcattcccggcaccctgaagaagtgcatggagagcaccgaagaatgggaagcaaccgccgcctacatctccgcccccgtaatggaaggccccaccgtcatcaaactggacggcgtgtactatctcttttactctgccaacgactaccgaagcattgactatgccgtgggctatgccacttccaactctcccatggggccgtggacgaaaaacgagaacagtcccatcatccatcgcagcatcgtaggcgaaaacggttcggggcacggcgacatcttcaccgacaaagcaggaaactattattatgtgtaccacgtacatgcgtcgaaaacaaacgtcgccccgcgcaagacgcgcatcatcccgctacacatggaaaagaacgaaagcggcatctacgacatcacggtcaacggagatgaagtaatagaaccttatcaagaataaccatttaaaaagcaacgtatgaacttaagaaatatactaagcggaatagcattgctggcaggcatactgagtgcgcatgccatcgaatatacccctgccaatgtatcggcttccatcgcattgaaggtccccggaaacgaagcggtacgttatccgttggagttccgcaagctccggaaagaacggttcgactatcagttgacggccacagagagcctgcccgtgctgatttatcagaaagtggaaggcggagaaaccaacaagcggattaccctcttcatcacagccacagagaatatctacttcaactacggcgaacaggtgaaaagcggagcatgccatgacgactgcctgttctatatgccaggcttctggtatcgccgcaaccttcgttcgcccaaagaggcgccttctttccacacctcagacagttgggtggtgcgcgaagaccgcctgagcactccgatgacaactatcttcgatgaaaagaacggcaagtcgttctcagtagcccgcatagacaagtttgaaagcgatgcgctgactactcacaaagagggcgaagtcatcctgtcgggaaccacttcgataggttataccggattcgagaactgcaacggcactgccacactttctttcggctatccctacaaagaagcgcccaaaacttatatccgcaaactgacactggctccttccgtagaagcctaccagtttttaggcaaaggagaaagcgtgacgttgacctgggagctcaacgaatccgctcccaccgacttctcggactgcgtaaaacaagcatgggaatatagttacgacctctacaagcccgcaacggtagaaacaccttataccgatgaagtgatgaaagaagtgatgagcaacttcttcgtagaaagtttcatcggcgatactcccaccaactattactcaggtgtagagttgcacacggcaacttgcaacaacgtcgacgtagccgaagtaggctttgtgggacgcaccctgctgaatgctttcaacgcgttggaatatggcgaaagcaagcagcgcaccgacctggtggcaaatgccaatgctatctttgattcttacctgaagcatggtttctcaccagcaggattcttcaacgaggtagtgcactacaaacgcaacttcatagagcctgtccacagcatccgccgccagtcggaaggcatatatgccacgctctattacctgaactatgaaaagaagaaaggcaggaagcaccccgaatgggaaaaacgcctgaaaggaatgctcgacaccttcctgcgcctgcaaaacgaagacggcagcttcccgcgcaagttcaaggatgacttctcgattgtagacaagagtggcggaagtaccccgtcggcaacgcttcccctggtgatgggatacaagtacttcaaagataaacgctatctcgaagcagcccgacgctcggtagattatctggaaaaggagctaatctcgaaagcggactacttctcgtctaccctcgacgccaactgtgaagacaaagaggcttcactctacgcctccactgctgcctactatctggcacttgccagcaaaggagcagagcgtgcacattatgcaggtttggcaaagaaagccgcttacttcgccctctcatggtattacacctgggatgtcccgttcgcaccgggacagatgttgggcgacatcggtctgaagacccgcggctggggtaatgtctctgtggagaacaatcatatcgacgtctttatcttcgactttgccgacgtactccgctggctgtccaaagagtataatgaaccccgctttgctgacttcgcagcagttatcagttcttccatgcgccagttgctgccctacgaaggacatcaatgcggcatcgccaagaaaggttactatcccgaagtggtacagcacaccaattgggattacggcaagaacggcaaagggtattacaaccatatcttcgcaccgggatgggtagttgcttccttgtgggagttgctttcgccgggacgaccggaagaattcatcggaaggtaaagatgaggctactctatttgccagtcctcgactttagataatatgactacgtttaaactcatttctgtaccgttatgaataaatataaaagcgccagaattttttcaaagaaaaaacgtttttaatggagtattatctgacactcgggcctcagttatgacaacacccgggtgtcagacaatatagaaaagatgaaacggttgataaataaagccattgtcaataaagaccataattttggaaatgcccgttgggtacgtaatatatttgaaaaaacattggaaattcaagccaactgcttggcaatggacggacatatctcaaataaatcattgactactattacggaatataatataatgaacaaaacaaactgaaactttctacctatattctattctctaatgctcaaaccacgttcttttcaaaaccacccaaacgtcaggaaaagacagaaagtgcaccaagtttcctttattagtttaaaaatgattatctttgcaaactaaaatgagcaacttgataataaaagaaataatagattaatatggcattgcaatgtggtattgtaggactaccgaacgtgggtaagtcgacacttttcaactgtttgtcgaatgcgaaagcacaagcggcaaatttccctttttgtacaattgaacccaatgtaggtgtaatcactgttcctgacgaacgtctgaacgcactcgctgaattggtgcacccccaacgaattgttcctacaactgtagaaatcgtagatatcgccggactggtgaaaggcgcaagcaaaggtgagggactaggaaacaagttccttgccaatatccgtgaaacagacgcaattatccacgtactccgttgcttcgatgacgacaatgtgacacacgtagacggaagcgtaaatcctgtccgcgacaaagaaatcattgactacgaacttcaattgaaagacctggaaaccatcgaaagccgtatccagaaagtacagaaacaagcacagacgggcggagacaaagctgcaaagttagcttacgatgtactcgttcaatataaagacgcactggaacagggaaaatctgcacgtacagtgacttttgaaacaaaagacgaacaaaagatagctcacgaactgttcttattgaccagcaaaccggtaatgtatgtttgcaatgttgatgaagcaagcgcagtaaacggaaataaatacgtagatatggtacgcgaagccgtaaaagacgagaatgctcaaatcctgattgtcgcagccaaaacagaagcggacatcgccgaactggaaacgtatgaagaccgtcaaatgttccttgccgaagtaggcttggaagaatcgggcgtagcacgtcttatcaaatctgcttataaactcctgaatctcgaaacatatttcactgccggtgtacaagaagtacgtgcctggacatacgaaaaaggatggaaagctcctcaatgtgccggagtgatccacaccgattttgaaaaaggctttatccgtgccgaagttatcaaatacgatgattatatcaaatacggctcggaagcagctgtgaaagaagccggaaaactgggtgtagaaggaaaagaatatgtggtgcaggatggcgacatcatgcatttccgtttcaacgtgtgattatcggttaccaccgacgacttattaattactaattcgctaacaatatgaaatatctcattgcaggaacgggaggtgtaggcggcagtatcgcaggattcttgtcgctggcaggcaaagatgtaacttgtattgcccgtggagctcacttgcagtcgattcaaacgaacggtttgaaactgaaatcggatttgaagggcgaacatacgctccggattccggctactaccgctgaagaattcaatggaaaagcagatgtgatatttgtatgcgtgaaaggttattcggtcgattccatcgtaggactgattaaaagggcagcacacaaagacacggttgtcatccctattctaaatgtgtacggcacaggaccacgcatacaaaagttggtaccggaagtcactgtcctcgacggctgcatctatatcgtaggtttcgtatccggcacaggagaaatcacccaaatgggaaagatattccggttggtatacggcgctcattgcggcacagttgtaaaacccggattactggaagctatccaacaagacttgcaggaagcaggcataaaggtagacctctcaccggacatcaaccgggatacgtttatcaaatggtcgtttatctccgcaatggctgtgacgggtgcttactacgacgttccgatgggagaagtgcagaaaccgggaaagatacgggatacatttatcggactttctacggaaagcgctgccttaggaaagaaactgggcgtcgaatttcccgaagacccagtcagctacaacctaaaagtgattgacaagctcgatcctgaaagtaccgcttctatgcaaaaagacctggcacgcggacacgactcggaaatacagggattgctcttcgacatgattgcagcagccgaagaacagggaatagatataccgacctaccggatggttacggagaaattcaaagaatctaatcattaacattaatccaatatagaatgaataccatgctattatccatcaactggaacccgaatcccgaactattcaacctgttcggcatttctatccgttattacggattactgtgggcagtaggaatattctttgcttatgtggttgttcactaccagtaccgggataaaaagatagaggaaaagaagtttgaccctcttttcttttattgtttctttggtattctgattggtgcccgcctaggacactgtctgttctatgatccgggatactacttgtctcatttttgggaaatgattcttcctatcaaattcatgccggacggaaactggaaatttaccggatatgaaggacttgccagccacggcggtacattaggattgataatcgccctttggctatattgccgcaagacgaaactccattatatggacgtgctggatatgattgccgtagctactccaatcaccgcctgcttcatccgccttgccaacctgatgaactccgaaatcataggcaaaccgtctgatgtaccttgggcattcgttttcgagcgtgtagatatgcaaccccgtcatccgggacagctctacgaagccattgcttatcttatcctgttcttcatcatgctttacttatataagaattacagcaagaaactgcatcgcggcttcttcttcggcctttgtctgacttatatcttcaccttccgctttttcatcgaattcctaaaagaaaatcaggaagattttgaaaacagcatgatgttcaatatgggacaatggttaagcgttccgtttatcataataggcgtctatttcatgttcttttatgacaagaaaaaaaagaaaatagcctaaatcaaaaaaagagggattagcggttcaaacatcgctaatcccttttttttatcaataaaacaaatgccatttccctaatgtcaggacaataatcgaaaacatatcctaagacattatatacattttcagcttatttccccctgactatcttcttaatatcattcagtttattcagcgcttcaataggagtaagattattcacatcaagattcaatatctcatcgcgaatctgacagagaatcggatcgtccaactggaagaagcttaactgcatacctccacgattctcgctcacttctgccaacggtttacctgctatgccctgttggcgattatcagattcaagctgtttcaatatctcatttgcacgtttcacaatgcttttcggcataccggccatctttgctacatgaataccgaaagagtgttcactaccgccacgttccagtttacgaaggaagattactttgttatcaacttctttcaccgatacattataattcttgatacgcttgaaagatttctccatctcattcaattcatgataatgcgtagcaaataatgtacgtgcttttgctttgggatgttcatggatatactctacaattgcccaagcaatggaaataccatcataagtagaagtaccacgacccaattcgtcaaataataccagactccgggaagaaacattattcaggatatcagccgcttcattcatctctaccataaatgtagattcaccgactgatatattatcgctcgctcctacacgggtaaatatcttatcaactaaaccgatatgcgcactttccgcaggaacaaacgagccgatttgagccaatagcgtaatcaatgctgtttggcgcaagagtgccgacttaccggccatgttcggacctgtaataataataatctgctgtgtatcgctgtctagcattacatcattggcaatatacttctcacctatcggaagttgtttttctattaccgggtgacgtccctgacgaatatccaatacgtcattatcctcaataatcggacggatataacgattctcacgagccacattggcaaatgacaacagacagtccagacgtgcaatctgattcgcattaatctgtatctgtggaataaactccatcaatgcctgtactaagtccgtatatagctgcgtttccagaatcagaatcttatcttccgctcccaaaatcttttcttcatattcctttagttcctgcgtgatataacgttccgcattaaccagcgtctgtttacgaatccactctttaggaactttatctttatggacattacggacttcgatatagtaaccgaatacgttattataagccactttcaagcttggaatacccgtcaactcgctctctcgttgctgtatttttagcagataatcttttcctgaataggagatttgccgcaattcatccaagtctgcgttcacaccatcttgaatcactccacctttattgacagccaatggcggatcattctttatctctttggcaatccggtcacgaatagtgacacaaagattcaactgttcccctatctgattcagacttgcattatccgcttgaatacatgccagttttatgggttcgatggcctgcaatgccactttcagttgaacaacttcgcgcggtgacacacgccctacagccactttggaaataatacgttccaaatcccctatcagatgtaactgttcttcaataacagctttaaaatccggttggcggaaaaaatattccaccacattcaatcgttcatcaatcggtttcttatccttcaacgggaagaccatccaacgtttcagcaaacgtgctcccatcgggctgatcgttctgtcaatcacattgagcagactgcttccgccatcattcatattgccgatcagctccaaactacgtaccgtaaacttatccaggcggacatatttatcttcttcaatacgagacaatgaagtaatatgcccgatttgcgtatgttgcgtcatcgtcagatattgcaggatagcaccggaagcaatgataccgttcttcagatgctccactccgaaccctttcaggttcttcgtttcaaaatgtttcagaagtttttcgcgggccgtcgtttccgtaaatacccaatcatccagctcgaatgtgaagaacttactgccaaaattaccctcaaacatcagcctcttgcctctttcaaaaagaatctctttcggaccgaagttattcaacagtttatctacataatcaaaaggtccctctgctgtaagaaattcaccggtagatatgtcgagaaaagcgactccgcaggaagccttgccgaaatgaacggcagccagaaagttgttctctttataattcagcacattatcattgatagaaacgccgggagtcaccaattcggttatacctcgcttcaccaactttttcgtcattttcggatcttccaactgatcacagatagcgacccgctttccggcacgaaccagtttaggaagatacgtatcgagagcatgatggggaaaacccgccatctcaatggttttaccttttccgtttgcacgttttgtcagtgtgattcccagaatctcagaagcaacaatggcatctgtagaatatgtttcataaaagtcgccgcaacgaaacagcatcactgcatccggatgttgcgccttcaaatccagaaactgtttcatcatcggggtaaggacgatttcttcttcgttcacggttctctccttttcttctttatttaaagtaaacaattgcgttatctttgcaaagataacggttttccggcagagaatcaacggtatcccccgtttcaattttcaaaataagtgttgcatacttttaaaaagggaagatgtttttcttaacaaacaggaagataatattaaaacgtgttataaaacatattatttttcttggataatttgctaatatcactgaagtccgtacctttgtaatgtgtttttcatagtattagatttaaggttaacaaaggttgggtcaaggcgttgaccctttttttatgtccgtatgtctcgaatagcaaaatctacttttttctgtcttcaaataaagcgattatgactgcttttagaacaggataaaagattatcaaagctttcgcactcctaatagttaaaagtaaaccaaataagattcgtattatttgaatcttatatgggtccttgaacaatcctaaaacacataaacttattccacttaaaaaaatcactaaaaagaatactgcacatataaaaatgggaaacggaccgtcatattcagtaaaatcggctaatctgtaatagtcaagacttgttctgacatttgttttactatcggacaaaaaaactgtcagatgtttgttgcgaagttacacaagtttcatcatcctcacaaccgaatgagattttatcctgctcattcggttttatcatttcctgattttgcagttgatactttcttgccacagcgattccttcgataaaagtttgcatgggcgttttcccgaaacagtactttccagagtgtgttctttgggtattgtaggagttcatccacatatcaaggtctgcttgcagctgttcgatagaggtatagattttctttctgaatgcaatagcatagaactcattctgcacggttctgttaaatcgctcacatataccgtttgtctgagggcttttcgccttaatcttagaatgatcaatgtcttccacagccaaatacaattcatactcatgattttctctgtttccgcagtattctgttcctctatctgttagcatacgcatcagtttcaagtcatgctgctcgaaaaaaggaataaccctatcgttaagcatatcggcagcaacaagcgcattctttctgtcatacaacttggcaaatccgattttggagtaagtatcaatgacggtctgctgataaatgtgtcccacacctttgatatatcctacataataagtgtcttgggcaagtagaaaaccgggataataagtttctatctctccataagcctgcttttcttcttttgctttttccaatgccgccacttggttctcatcaaggataatgccctcttgttccactttggctgacaatgctttcaggcgtttctggaaggtctccatatcgtgccgtagccaaatggaacgcactccgcccggcgaaataagaatacctttcttacgtagctcattggatacacggacttgccccaatgcaggattgtctatcgccatctgtacgactgcctgctcgatgtgttcttccacacggttctttatgacaggcttacggcgagaaatctcctgcaaggcgacttcaccgccttgttcatacaactctttgaaacgataaaaactgtcacgactgtagcccataatcttacaagcacgtgatacgtttcctaactgttgggagagttcaagcaatcccagtttgttcttgatgaccttttctgatgttgtcataacttaatctgttttctgttacaaatttattctttttatacgtaactgtcagattaagtcttgactaattcagctaatccaagccatttcttccattttctccgccgttctttcctcctttcttccggttccctttctttcctcattctctcccactctatcacacgccgacggaattcctcttggggacgctgtaaactgagattgtatctccgcatcttttcgctaatacgtttctttttcctttttgtcactcttatatttgttatttcttgtgtggttttacctatttatttcttttctgcctgatagactccaaaaataatgcaacctgctcccaataatgtaatccatgtgatttgttcgtgaagaatgattacggatgccaccattgttaccaacggattgagatagatataattggaggctctaacagttcccaactgtttcaataccacattccagaggacataacaaaccaaggatgccaggacagccaaaaataagagattagataatacaaccggttttaaaagtacatcgaaatcaggttgtaacggatgaagaagaaaggcgggaagtatggtcaatactccataaaagaatattttgcgggtgataaatacagtggggtaacgccctgtcattttctttatcaccaaactataaaatgcccacgacagggcggcaagcaaagtaagcaaatcccctaccggagataatttgagtacaaaactaccgttgaagaccaccagtcccaccccgattaaagctaatatggaaccgtaaatcaaacctttggtggctttttcactcttataaaagagaagggaaagaatggtagtaagcaggggagctgtgcaaatgatgaaagcgacattggatgcttgtgtgatccccaaagctgtattctctgtaaagaaatagagtgaaccaccgaagaaacctcctgccatcaaccaaagttcgtctttccaattacccgcaaacagacgtttaggagaaatcacccaaatacccagataagcaatgagaaaacgatagaagaatatctcctgaggggtcagtccgtgattaatcaatactttggttgatatgaaagtcaatccccagatagcaactacaagtatcgcaatcagatggtaatatccatgcttcaattccataatggtggtgatgtttgtttaatagagtgcaaagatagcgagaagttatggaatgtttgtttggagaaataacaaaaagcccgtacctttgtttatgatcaaagaaagctcctaaaataaggtataagttatggaaaatatatagcaccggacagaaaacgtatcccatacggcatgatgaactttgcagtaatccgccgtgacgactgttattatgtggacaaaacccggtttatacccatgacagaagaagcggacaagtttttcttctttattcgcccgcgccgtttcggcaaaagcctcactgtaaatatgttgcagcactattatgatatacttgccaaggataagttcgaagcgctgtttggcgacctttacatcggaaagcaccctacgcgcgaccggaacagctatctggtactataccttaacttctccggaatagtaggcgaactgcacaactaccgcaagggactggacgcgcattgccaaacaatgttcgactacttctgtgacatttatgccgactatctccctcaaggcatcaaggaagaactcgacaaaaaagaaggagctgtcgaacaaattgaatacctgttcacagaatgtaataagaccaaccaacgtatttacctctttattgacgaatacgaccatttcaccaatgccattctctctgatatagagagcctgcaccgttatacggacgaaacgcatggcgaaggttatctgcgtgccttcttcaataaaattaaagccggaacctattccagcatcgaacgttgtttcattaccggcgtaagtcccgtgacaatggacgacctcacaagcggtttcaacatcggaaccaactactcgctcacaccagaatttaacgagatgataggtttcacggaagaagaagtccgccaaatgcttacctattattccaccaccagtccattcaatcacagtgtagacgaactgatagaaataatgaaaccttggtatgacaattactgctttgcagaagaatgttacagtgaaaccactatgtacaactccaacatggtactctacttcgtcaagaattatattcaacgaggcaaagccccccgggatatggtagaagacaatatccgtatcgactacgaaaaattacgtatgctcatccggaaggacaaagagtttgcacacgatgcctccatcatacaaacattggtgagcgaaggctacgtcaccggagaactgaaaaaaggttttcctgccgtcaatatcaccaatcccgacaactttgtgagcctactctactatttcggtatgctcaccattagcggcacgtatgaaggaaagaccaaactcaccatccctaatcaggtagtccgcgaacaaatctacacttatctgctgagtacctacaacgaagccgaactcaatttcagcagttacgaaaagaacgaacttgctagcgctcttgcctacgatggcgattggaaagcctatttcggctatattgctgactgcctgaaacactacacttcccagcgcgacaagcagaaaggtgaattttttgtccacggctttacgcttaccatgacggcacaaaaccgtttttaccgtcccatttccgaacaggacacacaggcaggctatgtcgacattttcctctatccgctactggatatctattccgacatgaagcacagctatattgtagaactgaagtatgccaagtataaagatcccgaaagccgcgtggaagaactgcgacaggaagctattgcccaagcgaatcgttatgctgacactgatacggtaaagagagcagtcagcactacacagcttcataagattgtggttgtatacaaaggaatggatatgccgatatgtgaagaggtttaatacaaaaaaggaactcgcattacaagcgcatcatgcaaaaaaatctttcaaacgtgcgtatgattatcctgtatggaagttatacgcaaggttgtcccccaatatgatgcacgaatgaatattttcatttcatctctcatattttctcccttcaaatagccttatacaactcaacaaatattgctatttccattctcaccgaacagttattgatgtaccaatgtacttatatctttagtataaacgcctatcatttacagataatcttacctacataataattgttccactaaagtaaacagaacagtgcactccagtagagagatctgttcactctagtgaacggttcattgcactctagtggaacggttataatgcttattcaatcatacggatatacaactgaattataagatgttatacatcaatttacttataaacaactttcattatcggacaaaaacgttaattcattgtttcgacagggcttcctgtcatattccatccataagaatattctttttacgatcctatcatacccaaatcatatttgggctttctttcttgcagaatcaatacttttgttatatattgctgcccagtttccatcaaatctgtttgatacatctttattacaagcttgaccatttcaaataaagctgccataattggacaaagacagaaattttatcaagttttaaaacaggctcttatgaagaaatgctattttattattctttttatatttctctctgtttccgtatcatcatcccaaacgattgattatacacagggactttccatatggtttgatactcctaatggcttggacaatcgggccatttggctacgcgcttccggattggggaataatcctgacaaagcatgggagaacagttccctaccaattggcaacggtagtctgggagcaaatatactgggatctatatccgcagaacgaattacactgaatgagaaaacactctggaaaggaggaccgaataccgccaaaggagccggatattattggaacgtaaacaaacagtcggcaaatatattaaaggatatccgacaagcctttttagatggagacaaagaaaaggcggcccgccttactcaggaaaatttcaacggcctggccgaatatgaagaaagagatgagactccgttccgcttcggttcctttaccacgatgggagaactttacatagaaacaggacttagcgagattaatatgaagaactaccaccgtattctttcattggattcagctatggctgtggtacagttcgacaaagacggaacagaatatcaacggaaatatttcatttcataccctgacagtgtcatggtcatgaagttcactgccaataaaaaaggaaaacaaaatctcgtactcagttattgtcccaacagtgaagcagaaagttatctttcagcagatggaaacaacggcttgggctataccggagtgctcaataacaacaaaatgaaattcgctttccgaatcaaagctcttcataagggaggaatattgaaaaccgaaaacagccggattattgtgaaagatgcagatgaggtggtattcctgcttacagcagatacggattataaaataaactttaatccggatttcaacgacccgcagacttatgtcggcaaggacccggagcaaacaaccctggctatgatgaacaatgctctggaaaaaggatacgacgaacttataaggaatcacaaaacggattatacagctttatttaaccgggtacagttacaaatcaatccggaggccggtactcccgatttgccgacctacaagcgtctggataattatagaaaaggcgtgccggattatcaactggaacagttgtactatcaattcggacgttatctgctcatcgccagttcacgtccaggcaatatgcctgccaacctgcaaggattgtggcacaacaatctggatggtccgtggcgggtggactatcacaacaatatcaacattcaaatgaattattggcctgcatgttccgccaacctttcagaatgcacatggccgttaatagattttatacgcagcctggtaaaaccgggcgagaagacagcgcaatcctatttcaatgcccgcggatggacagcgtccatttcagccaatattttcggattcaccgcacctctatccagtaaatccatggagtggaacctcaatcctatcgccggtccatggctcgccacacatatttgggaatattacgattatactcgtgacaagagatttctttcagaaatcggttatgagctgatcaaaagcagtgcacaatttactgtagaccatttgtggcataaacccgacggtacttataccgccgctccctctacctcccccgaacacggaccggtggatgaaggagtcactttcgcacatgccgtagtacgcgaaatcttattagatgccatacaagcaagcaaagtgctcggagtagacaggaaagaacgcagacaatgggaaaatatactggcaaaactggttccgtaccgtataggaagatacggtcaattattggaatggtcgacagacatagacgatccgaaagatgaacaccgccatgtcaaccatttattcggtttacatccgggacatactatttctccactgaccacccccgaacttgcaaaagctgccaaagtagtactggaacatcgcggagacggtggtacaggctggagcatgggttggaaacttaatcaatgggcacggctgcaagacggaaatcatgcatataaactttacaacaatttattaagcaatggtacactagacaacctatgggatagccatgcgcctttccaaattgacggaaatttcggcggcacggcaggtattaccgaaatgctgttacaaagccataccggaaccatccaattgctccctgctttaccggatgcatggacaaatggttcgataagcggaatatgtgccaaaggaaactacgaaatttcaattttatggaaaaagggaagactggaaaaagcttgcattctttctaagtccggagggccttgtactttaaggtataaagacagtacgctcacactcaaaactgtaaaaggaagaaaatatgagattgcactagatggaaatcaactcacgttaattagtacattaatcatataaaataaaccctaaaagttagacaagaaacttttagggtttacttcatcgtattctgacttacttatttaacgtgtgttcgaaataaaatcaaaaaatagcaagttgtccgtcattgcacaaaatttacgtcaatggcgggcttcttttcaaaaaagcagtatgccgcgatagccgacaaggagttggctataaagttattgaatgaacgatgtctggagtgttctatctgcgcaatgttcttcaattcgtcattgactgtttcgagcagggctctttttctgagcaaaatcttgtcggtaatactcatcagtgagttcctcatattgtttttaactttagtgacaagctgtataccattaagaaaaaggttctcaaacagagcctgaccaatatatcctttgtctcgcatagttttcctttgatgttctccagaaactcaccttgcttcaacggttcccggtcatccacatttccaggcgtgaacatgaaattgaggacctcacccttgtcattgattatcagatgcaacttgaatccgaagaaccatcccattgaacacttccacgctcggcaagtccctcaaatgtcttatgaataaggattctttggttacggcaaacacgtaagggagtggagtcgacaaaactgatgccggtacaggttcccagcaggactttcttgatgaagatggtcagtggaagcaatacttccttctccaattctataaaacggttataagaaacctgacgcggaaaaaggtgtttcagatgtttacagacatattccttatagtaatgcttgaaacagcggaaaccaccggagtgaaataggattagaataaccataatctcagcatcactcatacggttggggttgttacgatgattggtcctcttatactcaatcacatatttttcccgttgaaatgtaaattccttgcaaaaatcatcggccatacaataaatctctgtaactttagactctggaaacatagtggtaatcgtttaaatgttataattggacactataaatttaatgattttatcgctatgtttctaattgtcaaaaaatatatttattcttatttcgaattcacgttatttattcaataagtttcctatttttataagtaatccctcataatgagctttgtcatccctgtgtgccgaaccgatacggtttttcatcaaagactgtgctttttcaaaaagtacgactgataattagcaacctcactaatatcagaaacagcaattatcccctgataagaataggcatcttcaccaaataaagaaacagtgttatattgatggctgcaattatattgagatgtctttggatttgaatccacaggcttataagaatacaggatgggcgtttctggtaacatgtgaactggatgatgacatagagaagaaggatgtcagtgtgttattctacggtgttggttatcatatagtcccctgtttcgaattgttgacaaacaatgatatgaactggaattttgaggtgatcagtctaaatgaggatgttccatatattgcggatcccaaattcttatgcagatgaacaggttgtgcatatgtctggttctctctacagtttttttttgaccgggtgtgttgaaaagaacggatattatacggaaggggagaataacgtcatctctttggtttgtgacgtgacatggtccactgaaaataccattcatgatgcaggagaaacatcccgggaaatctatcagttcaaaagggacggcacttgtacacgtaccatcatttggaccaacaagaatgaggaggaatccaaaacagaaatttattaccggtgggctttttatgatcagggttccagtacgatttatttcggtgagagccattattgggatattgaagaacttacttccacgaagttcgcagtttataacaggtttggagagtatggaagtctggatatgtcccgggaatacatggaactgtcccctttgaaatgacatatattatgttgaaggtcatttgaaaagattcacggtgtcttggaacgtgttcggtgtcctttcttcagcgtttttctttctatatgaaaacatggcttttccctcttcatatatttatttctccttgttcatcaaaaaccaaccttttcactgccatttatatacggcaaatctttcgtcatcaaagttgccagttttttccacgaatgtctttatacttggagcggaagtatatttggtctgaataatatcatctaccagacagctgtacaatcccctgatttctttgaaaaggaaacttaggaacataaggttgatgtattcaggattgttgtatatgtatgttttatatgccagatatgattttgacttcatatagtctgaagctctgctgctgagattgggcttgcgaagttcttcctgcaatgccttttccaactgtttatattcagtggaatccgttatgctgtaccaatagtgctcctcggacttagtagccaaggtctatccatgcagtgacttcccaataatcagtcgccattctttcttatggagtctctgcattccggggacatggtacagtaaagggagtccttttcccagtccttgaaaagaacttcaatggaatcaattttttcctgtttcagttctttgtatatgtccggcaattttttatcagaaatggaggtaatttagaaaactccattttcaattctgcaattaacccgtagcctggctatgatagaatcattgaatacaaaagcaatttgcctgcctgttgctctttctgtttctttcgcccatttattcattttgtatttactgatttgcccgctaattgtatatttctccgaatagtctgtctccagtctaaggaaaatgaaatctttagttgtcacgataggttccttggagatactgtctgtttgttcagataaaatgtgctaccaaccgttttcccgatatctattccggctggttagggagtatggcaagaaagaaaaacagaccagtattcccaaatattttttgctttattcatagtaacaactttatagaatccgacttatcacatttttattttttagaaaaggtataaagtgaatacgaatataaatctttcctttctacccccaaaagtatatttactgtttattatttctgtaaaagagatcataaattccttttatccgtttttgaggtatgaaaagttgccgttttatagaagatgttatatacttttgcggaaatttcatgataaataaagtaacagtgtttttatgtactgtttgcaggacataaatcaaatttttttaaatttacaaatgtgatgaaaaaagttttttttactgtttttttagcgttgtgttgtacgatgggctttgcacaactgtcttttaatgtaaaggccggccttaatcttagcagttacattggcgacaattctgaccattccaaattcaaaccgggggcacgtgtcggagtgggaatggaatatcagtttaccgatctggtttccttgcagtcttcgctgttcttttcgcaaaaaggtgcgaaatattcagaaggatatgacggaagcatcatagatgccgatactgatgtaaaaatcaaccagctctacctggaattgcccatcaatgtacagttccgttttaatattgcagataacactaatcttgtcatagcgacaggtccgtatctggcttgcggagtgggtggaaaaactaagtttgatggcggggcgtccgttggcagtatcaatatcaccggtgatgataagattgacacattcggtaatgacggattggactataatcggtttgatgcaggatggaatatcggacttggtgtggaattcggacgcattctggtaggtcttgatacccaacttggtttttgcaaagtgatggacggaaatgctccccataatgctaatattggtattactttaggatataaattctagcctgttcaaatcgggcagttgataaccagcatgtttctttctgttttttctatcttggaattgaaacattgatttatattctatattataacttccaaataatcatttagtatgaaaaaaatattcgttttatttatcgttttctttctgacgttaagttgctcatatgcccagaaagggaagcaggctataggttttggactcagctatgggacagagattgaaagtataggattggggatcaaatatcagtataatataactaatcctattcgtatagaaccatctttgaactatttctttgagaatgacaacgtaagcatgttggatgtgaatgtgaattttcattatctgtttgcagtgtccgggagcgttaaactttatcctttatttggtttgactttatctaactggatgtttgatgggtatgatttggaccttgattgggatggcgaccatcttcattttgatgatggagggaaccataatgagtgtcggtttggtgtaaatttgggtgcaggagctgaacttactttacctcgtaactgggccatgaattttgaatttagatatcaactggtaagtgattttgatcaaggggtcataaacattggagcagcatacagattttaaggaacagttcgaaaattggactcattattgacgaaagagggggtaagcatgatgatttatgtctgcccgctctttttttatgcatttatgataaccgtatatcaaaaagagtaatcaatttctattcttgactatccttatggcatttataatcatatttcacttatttataaatagtttaaatctactgtattcatatgtaaatataatatgtaaattaataattgcatgtttccaaaaatattagcgaacctaaaatttaacatatattgtattgtttgtttttatataatatgtatatttgtgccgttaaacctaaaaatataattcatatatgaaaaacgagtatctaataagttcagctgttaatatgttgaaaatctgcaaacttccttttggaacttcttgtaataacgtctgtaaatataactatccgttatttgtctaaaacttttctaatttttaaattattatttaatgaaaacaaatctgaatcgcaagggcttttgcctgctttttagcttgttcttgttggctggtggtgggggcttgtatgcatctgactatcattctatgagccaagtgcaagacaatgtaatcagtgtttccggtaccgtaaaggacaccaaaggagaaccgctgattggtgtaagtgtattggtaaagggtactaccaacggtactgtgactgacctagatgggaaattcacattaaaagtttccgctggggatattcttgagttttcttatatcggctatgcttcacagtcggtgacggtaactaatgctaattccctgaatatcacattaagtgaagatactcaggctttggatgaggtggttgttactgcattgggtattaaaagagcagaaaaggctttaagttacaacgtgcagcaggtaaaatcagaagaactggtacgtactaaagatgccaactttgtcaattctcttaatggtaagattgccggtgttactattaataaaagtgccggtggtgccggtggttctacgcgtgtagtaatgcgtggcgccaaatcgatcgaaggtgacaacagtgcattgtatgtagtagacggtatacctttgttcaatacgactttgggtactggcaatgatgtattgggtgagggtagagctactaccgaaggcatcgctgactttaacccggaagatatagagagtatttctgtactgagtggtccatcagctgctgcattgtatggtagtagtgcagcgaatggagttatcctgattactactaaaaaaggtaaagaaggaaaactttcaatctctttctcctcttcttccgagttcagcaaagcttatatgacccccgagttccagacaacttatcggaacaagagcggaatatatgaaagttggggtgatctgatgactacacctacttcgtatgatcctaaggatgatttcttcaatactggtaccaattttataaattcattgactttgactaccggtaacaagaacaatcagacttttgcttctatttcttctacgaattcaaaaggcattgtgccaaacaatgaatatgacagattaaacttcactattcgcaatacgtctacattcctcaatgataaattacagttggatttaggtgcatcttacgtgaagcagacagaccaaaatatggtttcacaaggacaatattggaatcctgttatggcagcctatttgttcccgcgtggggaaagttgggatgctatcagaatttttgaacgtgaaaattcggcacgtaacatttcagagcaatattggcctataagtgaaggtacttatgcttcgcagaatccatattggacagcctaccgtaatgttgctcctagcgaaaaaagccgttatatgttcaatgtaggtctgacttataaaattttcaattggttgaatgttgctgcccgttatcgtatggatgattcatacattgattttgagcggaaaatatatgcctcttcttatgatgtattcactgaaggttccaaaaaaggcctttatgaatacaaccattataaagaccgccaggaatatgcggatttcatggtgaatatcaacaaacaaatcaaagatttcagcctttctgccaatttaggttacagttattccaattactgggcagaattgagcggttatagaggtccgttggcattaatccccaataaatttacagcaggaaacatcaatgctagcaaagcgcgtgtcattgaaggtgaaggtgacagccgtgtccgcaataatgcgcttttcgccaacctggaacttggctacaagagtatgttgtatttgactttgactggacgtaatgactggaattcccgtttggtgaatacagacgaagaatcattcttctatccttcagtcggcctttctgccattgttaccgaaatgtttgatttacccgatttcatttcatatttgaaagttcgcggttcttatacagaggttggttcaccggtttccagatcaggtctgactccgggtactgtaactgtacctattgaaggaggggcgcttaaagaagacatgatttatccttttacagatttcaaggcagaacgtacccgttcttatgaatttggtttaagtcttcgtttatggaataagttgagtgcggaagttacttattataagtctaacacttacaatcagactttcttgggtgatctgcccgagtctaccggttacaaacagatttatttgcaagcaggtaatgttcagaaccgtggttgggaagcttctttggggtataatgacaaattcggtgatttcagtctttcttccagtctgactttctcgcgtaatattaatgaaatcaaagaaatggtcgaaaacttccatacagacattacttcagagccaatcaacataccggaagtaagaaaagataatggacgtactttattgaaagtaggtggcagtatacacgacatttatgcagatcgattctttaagaaagacagtcaggggtttgttgaaatcaaggaagacggttcttatggaatggaaaatacggaccctgtttatttaggtcaggttgcacccaaattcaatatgggatggaacaactcattttcttacaaaggtttcggattgagcttcctgatcaacggacgtttcggaggtgtagtaacttcttctacagaggctattcttgaccgcttcggtgtttctaaagcttctggtgaagctcgtgatttaggtggtgctttattgcctggacaagggcgtgtagatgcagaaaagtattacaaaatgattggaaccggagattatcatacttcaggttattatgtatacagtgcaaccaatattcgtctgcaggaactgacgttgagctatacattccccaactcatggtttaagaatgtgttgaaagatgtaacagtttcattcactgcaaacaatccgtggatgctttattgcgaagctcctttcgatccggagttgactccgtctataggaacttatggtcaaggtaacgattactttatgcaaccaagtgtcagaagtttcggctttggtattaaattaaaattataatgcaacaatgaaaaagataaatcaatataagcttttggtagctttttgcatattgccttgttgggcatcttgcgattatgaggaggttaacaccaatccctatgaagtgactgatgaggaggcgaaccgggatggtgtggctgttggtggttctattatgagtcttgccagacaagtttttccggtgggtacccctgcaaataaaacagatatcattaacgaatatcagacatcatttaatgtttctgcagatgtctggagcggatattttagccagaacaacaattggtatagcggaagtaaccatctgacctactatttacaggatgattggacatcgtctacctataccagtacttataccaaggcatatgcttcctggaaaaaaataaaagaaaatgcagaagaaacgggaaatatggcaaattatgctttagcacaaattttgaaaatatcctgctggcacaaggcgcttgagacattcggtccgatcccttatacatatgcaggcgaaggcttgcttgttgtgccgtatgacactgaacaagaagtgtatactgccatgttcaatgatttgaaaagcgctataactgagttgacttcactggcaaattcaggtgccaaagtgatggaagattttgacctggtgtacgcaggagatccggttaagtgggtaaagtatgccaattcactgatgttgcgtctggctatgcgtttgaaatattgtgctcccgatatggccaaacaatgggcgcatgaagccttgaatcatagcgtaggagtgatgaccgcgaaagatgatgaggctaaaatcagtccgaatgccaattatgcgtttgacaataatattgcttatttggcaagcaactatcaggagtgccgtatgggtacaagtatgtatgcttatctgcaaggctataaagatccgcgcatgagcaaatattttacaagtatcaaacaggagaattcactgccgggatttgatggcaattggtatgcccctgtgcctcccggacatactatgggtaagggagaatacaccgattgctctcagcctaatatgacgggaagcacaccgacttattggatgcgtgcatcggaaatgtatttcttacgcgctgaagccgctttggaatggccagagtttggtaatgccgaagcactatataaacaaggcattcagatgtcgtttgacgaaaacggagtctctacaagtgtagattcttatataacaggagcaggcgcacctgtatttgtacgggttcaatctcctaagaataattatttggcttcagaacctactacagctactccagcttttgaaggaagccaagaagaaaaactggaaaagatcatgattcaaaaatggattgcactttatcccaacgggcaggaagcatggactgagtggagaaggacaggatatcctaagttgcatcaagtgcaggagaacagaggttctgcaaatggtataaccaaagataaaggcattcgccgtatggtttatccgataagtttctcccaatctgcagaagatagagccaactatgaagatgctataagtaaattgaaagataaaacagataaggcaacctccagattgtggtgggattgcagataaataatttaaaaatgtatattatgaaagtactgaaaaaactattatatgcgattcccatagcgggaataatatttgcatcttgtacggatgtagagaaaatggaaattgaacatattggcggtttcaatacaatgaacaatgaagagagtgaagcttattatgccgaactccgggcatataaggaaacagccagaaactatggccgtcctgtggctttcggatggttttccaactgggcaccatccggtgtgataaggaaggggtatttgacttctgttcccgacagtatggatatcatatccatgtggagtggtgctccgggaagatatgaaattacggaagcacagaaaaaggataaagagtttgttcagaaagtaaaaggcattaaattgctggaagtaagtctgctttctcatttgggtaaaggaaggactcccgactgggtctatgaagaagtggagaagcaggccgaagaagaagggtggaatgagagtaaactgaacgaagaaagaaaaaaagcacgttggaagttttgggggtatacctccggaaatcctgaaggtgccgacatgaaagaggcattggccaaatacgctaaagcgctttgcgattctttgtttgtaagtgaatgggacggttttgatattgactgggaaccgaccggcggatttaatgatgcagataatacattgacgtatagaggttataatgggtattctaacatggagtttctaataaaagaaatgggtaattacatcggtccgaaaagcgacccggagggaaagggacataaattattggttattgatggatatatcaatcattttggtcctgagcttgatgaatatatagattattggattacacagtcatatggaaattccagcccaaattataggccacagagtggtaatttgaaaaagttgattattacagaaaactttgagtctagcgcaacaagtggtgggcagttgttgaaccaagcccggtggatgcctgaaaacggcaccacttacaaaggtggggtaggagcttatcgttttgacaatgattatggtaatactccggattataagtggatgcgtcaggcaatacaaattaaccagcaggtattcaatgaatggaaagccgctcagaacggggaaaatacagaaggagaataaccactgaagtaaaaaattagattaaagattatcatgaataagattcgattaaaatacatagcaggttttgtcattggagcattgcttttcggttgcaatgacagtgaaagtgacttgctggaaaccaaagtatactttgaagaaaacagtgttactattaaagcctcgggtgatgatgtcattacccatgatttgcaggcgagactttctttcaaaagttcctcgccgacagaggtaacttatgaaataggaggagcaagtgcggtagaggctttcaatgtcgcacatggtacaacttatgaactgctcgacccttctcaggcaagtctggaagttacatcggccactattgaagccggaaagatatacgctccgcaaaccactgtaaaactcagtggtatggcagatattgctgaaggaaaaacttatctgttgcctgtatgtgtgcggtcatcttctttgcctgtcatcgaaggttcggatttcacttatctcgtcatcagcaaaccggtagaaatacggactgtaggtcagttctccagcaattatatcaagataccggtaagtccgcttagtccgttcacatcggttacttatgaagctttgatctatttaaatcgttttaattctaataacacgattatgggaacggaaggtattctgatcctccgtataggtgacgaagctttaccaggcggacacaatgactggatgcaaattgccggaaataagcaattccattctgaacaggaatttaaaaccggtcaatggtatcatgttgcatttacttatgatcaaccttcgggaaaggctatactctatattaatggagaaaaagcctctgaaagcagttgggatactccaagtttcgatttgtcaaacggcggatgttttgttggaaaagtaaaaggctttatgtggggagaacgtcctttcaatggatatatgagtgaagtcagattatggagtgtggctcgtacggaaaatcagattaaacaaaatatgctttctgtagatcccgcatcagacggtttgtttgcttattacaaactgaatggaaaagatttgactcaagaaggtggtgttccttacattaaagatgcttccggtaatggaaagaatggagaaactgatgtccgtttcaaagaattggatgaaccggttgctattaattgacatcgtacttctctttgaatattttaagtaataacactgtacattgagtgtaactaagaaaatacgggattcaaaaggagagttccgtattttttaatatttttatttcttaaattttgtattgtaatgatagctaacaatgaagaagtggagactgttgatcatttttccatgttattcaaaaacaattattccagagtaaaatattttgcttatgtcttgctgaaatccgaacctgatgcagaggatgtcgcccaggaggtttttgccagactttgggaaagacagaatatttggttggacaatgaaagggagtttgactcatatcttttgattatgacaaggaatatcgcattgaacatatacaagcatgagcaggtcagacaggaatacatggaatatcatatggtgaaatcagtttcctcacagatagactatgattttttcgaaagatttcattatcgggagatgcttgggattatctattctgcattggctgcaattcccgatcgcagaagaagagtatttgaactcagtcgttttcatggaaaaagccataaggagatagctgtcataatgggaatctctgttcataccgtagaaagacaaatatatttaacgctaaccgaattaagaaagactataacggcatttgcttgattggaaacaactataatataatacgtatatgattgcattgaatctgaactgcaatcagcgatctataacatacttcagttaaggcattcggcatacatgttaaagccttaaaaactaattgggcgtcatctcgttttagttgtttggaagtaactgtaaaaacagtcctgtattctccaactccatttttcacccactgaatcttttgtttgttgatatcataaaaaggatcggaaagttgtttatggttgataagaccctgatgaattgcactcttgaaacctaatgctagtaaccacaactccgttcctgtctgaaaatttccaacctatatttttgtgcatgttatttgagcattttttcgattaaattaattatcatagtggagaacatcaggtattaacggtttcaaagatcttactttttaacaatatcttaccatctcttctgcttgttgcaatgtttagttttcttgttttcaatcatatatttttcctgttgcaatataaataccttgtattatacaataaatttttgtaactttagtttctgaaaatatagtggaaatcgcttgtaacatgaaatccgccaatatccccatcgagtccatcatgcagtttaccaaactctccagagaggaatttgaaaaattgtaatgcctggatagacttttactccagtcgacaatttagcttgcttctgatttatgcgtactatcaaataaatgttaattggcctcttacttttaggttggcatagattaaaactagcttttacaatttcattaatgaatacctgtcctgccatagccttgttctttgaattggttctttaatttggttcttaaattccgttctttgaggactgaatatgagacaatatgtactctataaacaaactgacaagcctcttaggaatacccaaacaaatattaggtagtttgggacaaatcacgtaaatttgtgcctcgaattagaaataacagtatcaatcactataaataaaaactttatcactatggagtacaatttcagagaaattgaaaagaagtggcagaaaaggtgggtggaagagaaaacctaccaagttacggaagatgattcgaaacaaaaattttatgtactaaatatgtttccttatccatcaggagccggactacacgtaggacatccgttgggatacattgcttcggatatttatgcccgttacaaacgactgcaaggcttcaatgtactcaacccgatgggatatgacgcatacggtctacccgcagaacaatatgccatccagaccggacaacatcccgctatcactactgtcaacaatatcaatcgctaccgcgaacagttggacaagatcggtttctcttttgactggagccgtgaaatccgtacctgcgatccggaatattatcattggacacaatgggctttccaaaaaatgtttaatagctactattgcaacgatgaacaaaaagcacgtccaatcgaagaactggagaaagcttttgcaagtcaaggaactgcaggattgaacgctgcttgcagcgaagaacttagctttaccgctgaagaatggaatgccaagagtgaaaaggaacagcaggaaatcctgatgaactatcgcattgcttatttgggtgaaacgatggtaaactggtgtgccgagctaggaaccgtattggctaacgatgaagtagtagacggagtcagcgaacgtggcggttatcctgtcattcagaaaaagatgcgccaatggtgtctgcgtgtatccgcatacgcacaacgcctgctggacgggttggacactatcgactggactgattcactgaaagaaactcaaaagaactggataggccgttcggaaggcgctgaaatacaattcaaagtaaaagacagcgatcttgaatttactatctttactacccgtgcagatacgatgttcggcgttacctttatggtattggctccggaaagcgaactggtagcacaagtcactactcccgaacagaaagcagaagtagatgcctacctcgaccgcaccaagaaacgtacggagcgcgaacgtatcgccgaccgtagcgttaccggtgtattcagtggagcatatgccatcaatccgtttaccggtgaagcagtacctatttggatcagtgattacgtattggcaggatatggaacaggagccatcatggctgtacctgctcacgatagccgcgactatgcttttgccaaacatttcggattggaaatccgtccgttggtagaaggttgtgacgttagcgaagaaagtttcgatgcaaaagaaggtatcgtttgcaactctccgcgtccggacgtaaccccttactgtgacctttctttgaacggattgactatcaaggaagccattgcaacaaccaagaaatatgtgaaagatcataacttgggacgtgtgaaagtgaactatcgtttgcgtgacgctatcttctcacgccagcgttattggggagaaccgttccctgtctattataaagacggaatgccctatatgattgacgaaagctgtctgccattggagcttccggaagtagctaaattcctgcctaccgaaacaggcgaacctccattggggcacgctaccaaatgggcgtgggatactgtaaacaaatgtatcacagaaaacgagaagattgacaatgttaccatttttccgttagaattgaatacaatgcccggatttgcaggttcttccgcttactatctccgctatatggatccacgtaaccacaaagcattggttgacccgaaaacagaccagtactggaagaacgtagacctttacgtaggtggtaccgaacatgctaccggacatttgatttactctcgtttctggaataaattcctgcatgatataaacatttccgctgtagaagaaccgttcctgaaattagtaaatcaaggcatgattcaaggacgaagcaactttgtataccgtatcaaagacaccaatacatttgtttctctgaatctgaaagatcaatatgacgtcactccgatccatgtcgatgtaaatatcgtatccaacgacattctcgatctggatgcattcaaggcatggcgtcctgaatatgcaacggcagagtttattttggaagacggaaaatacatttgcggatgggcagttgaaaagatgagcaaatccatgttcaatgtagtcaatccagatatgattgtagacaaatacggtgcggatacacttcgtatgtatgaaatgttcttaggtccggtggaacaatccaaaccttgggataccaacggaatagacggggtacatcgctttatccgtaaattctggtcattgttctacagtcgtacagacgaatatctggtaaaggatgaacctgcaacgaaagaggaactgaagagtttgcacaaactgattaagaaagtaacgggagacattgaacagttctcttacaatacttctatcagtgcattcatgatttgtataaatgaacttttcaatctgaaatgcagcaagaaagaaatattagaacagcttgttgtcgttcttgctccttttgctccccacgtttgcgaggagttgtgggatgtactcggacacaaaacttccgtatgtgatgccgaatggcctacatacaacgaagaatatctgaaagaggacacaatcaactataccatctctttcaacggaaaggcacgtttcaatatggaatttgcagcagatgaaacatcggacgctattcaggcggctgtattggctgacgaacgttcgcaaaaatggatcgaaggcaagacaccgaaaaagattatcgttgttccgaagaagattgtaaacgtcgtactttaatttgtctcaccacagattacacaaatttacacagatgaattacgaataaatctgtgataatctgcggtaatctgtggtgaaattatcatataaatctacttttatgtataaactggaaaaggcggaattaatgagggaagtgaaagattatatctacattactctcggattgataagttattctttgggatgggcggcattcttactaccctaccagataacgaccggtggaactaccggtatcggagctattatttattatgcgaccggatttccgatccaatggtcatattttattatcaatgcagttttgatgacatttgccatccgtatgctaggtccccgattcagtataaaaactacgtacgccatctttatgctgacattcctgctttggcttttccaattaatagtcaacaattatatagtggcaccggatatgacaccggacggcaaaccgttattgcttggacccggacaagatttcatggcttgtattatcggagcagccatgtgcggtgtgggcttgggcatcactttcaattataacggaagtaccggtggaacggatatcattgcagccatcgtcaacaaatacaaagatgtatcactcggaagaatgatcatgatctgtgacgtagttatcatcagttcctgctactttatattccatgactggcgtcgtgttatctttggttttgtcacactgttcattattggtgtcgtattagactggattatcaacagtgcccgtcaatcggttcaatttcttatcttctcaaagaaatacgatgaaatagccgaccatatcataaaagataccaatcgtggagtaacggtgctcgacggtaccggatggtatagcaaaggcaatgtaaaagtattggtggtactcgccaaaaaacgccagtcattagacatcttccgcatggtgaaacgtatcgacccgaatgcatttatctcacaaagttccgttatcggagtatacggagaaggattcgacaagttgaaataatcagttgattgttattgaataactctattgaaataaaaaagaatgatgaaacgcaaacttgtatttgccactaacaatgcccataaactggaagaagtagccgctattttgggagaccaaatagaattgttaagcctgaatgatatcgattgccacacagatattcccgaaacagccgatacattggaaggaaatgcgttgctgaaatcttcctttatctacaacaactacggtttgaactgctttgcggacgacaccggtctggaagtggaagcattgaatggagctcccggagtctattccgcacgttatgcaggcggagaaggacataacgcgcaagccaatatgcttaaactgctccacgagttagaaggaaaggaaaatcgcaaagcacagttccgtactgctatctcgttgatattggacggtaagaattatcttttcgaaggaataataaaaggcgagataatcaaagagaaacggggtgaatcaggctttggctatgatcctgtctttcaaccggaaggttatgacaagacttttgccgaactaggaaatgatataaaaaacaaaatcagtcaccgtgcattagccatacaaaagctctgtgagttcttacaacgctaataatccatattccaacagtatataaagcacaataattcactctgcttgctcattagttatatacttcatacatcacgaaaaagaagtttataaatgcagaattggtagtacagccagtaaagataaaatagggatattcagtaaatgttcctctttctaaaaaatcaagagaaaagctcacgtaaagcaaagcttttctcttgattttttcgttcaactctcccagtcttctatcttttttgtagaatattgtttacatattcttgttttttccttcccacccatgcattatgtacatgtcttttttaggggaagttaaaacctctcctgtttttcctgttattttagtcagattatgctgcctttctttttttcttttcgaccttttctatcatacataccgcattggctgtatgtatcccaaagaaaatccaaagtacttccgttttcctgtttctagcttttatcctggccagtgagtaatgttgtttctgcgttccaaaacttccttccaggcgggtagctctttcgcggctgagttccgaccgtaagattctccgaagcggctcatctttggcagctctgcccttacgcttaaaggaagtacttatatgatattttgtacaaaatttccggttggcattattggcatagattgaatccgccgcaagcgccttaaccctaaccccggtcagttgttgttgcagatgaatacagtctttcaaacgtactccttcgttaaaagccttaaaggagatatgttctataaaggagattccgtctatctgtatattgttgactttggctccgaattcaacggatttggtttccttgcctctgataatggggcgaaggtaatgccggtcgatactcacgatacggttggacacttttttgcctgcaaataaattcttcccttgctcaaggactgtctgtatgaccgagaaacgtctttggtaatcagaggatagtgcaagcctgttcctgtaggatgaatgaagctgctccagctggtcaagtaacttttccaataattgaagtaaccttcgtgtaatcatacgagtctgtgatttcctgcgtttacgcagtttgctataagcaagataggcacggcgtacatcaagatacttgttacggggacgttgtatgtgcaatgtacggcaatgtttgcacagatgacgatgaagccatacaataccttcccataagagtttggcatcagtaggaaaacgcaggtgactttcataacaggtggcatcggtcatacagacatgaaggttctcaagataaggtttccaatgctcggcaagaatgaactggagggactcaacatcaaggcgattcgctagttcctgacgaattgcactaacgattttaggattggttagtggatgaagcggatcaatctggacaccacaaaacaactggtaatgaatattaccgtttaaatgctcaatcagttgtgcatcggaaaagttggtataggacttcaagaccatcaaggctattttaccttcgggagaaaaataacttttacgacccaaagcagaggacttcaaatgcatttgtcgggccagttccgagaaagggaatagagaatggagtcgacctaattcactcgttgcaaaactttgacgatattttttaagcatatcgaactcggtaaaacctaaacaaggttcgatttctgagattttttgtatctttaccatgtgtttttattttagattacccccgttttggccgtcaaaccgttttttggggggaatgcttaaagatacaaaaaaggcaactaattcgcaatgaagtagttgccttaaattttattattttaggaatatcccaaaataacctgcaaagactattttatctttactttaaatattctcctatattttattctgctttaatttcaataacacggctattcaactgtcgtgtagtgaaaacgttcaaaccgacattcatcagatattcaccggagaaaagctgaccattatctttcaaagaagaactactaccggacatcatgttaatttccttcacacgatacatctgatctgaattcaatccttgtaaacggacaggtaatgttttttctccataacgaggatgaatatcaaaagcaaaaaccacggctgttttcctatctttccccacatacatggaagaagtatggttgctgccataaggagaaacaagacgatacaaatcaccatcaagaataacaggcttcaagcgattatagttcttgactgcctgaacacaatacaagtgatcgctctgactcatatcatccaacttaatatcaaatcccaatttacacatcatagcaacatccgtacggaacttaatgctggttccacgattccaagtggtaacatgagcacacagtgttttactgggaaatacctgcgaaaatccccattggataaaaagacgttcgataggatcagtattgtcgcttggccaaaactctgtaaaatatttcaaggcttcataatcagaacgtccgccaccaccggaacacaacatcataggaagatcagggtacttcgccttgattctgtccaacactttatagagtccacgcacataatcaatatacaaatgagactggttttctttcagatacattgaataaatgtttgtaatagggctattgcagtcccatttgaagaaagcaatacccggatacttggtcatcaacttatctaccacgccgaatacataatcctgcactttcggattactaagatcaagcaccatttggttgcggaaataatattcatcgcggttaggcagatgaatcacccaatctttatggttttcataaagctcgctcttgggattcaccatctccggctctatccacaaaccgaatttaatgcctttcttttgtgattcttcgacaagacgtccgattccgttcggaagtttgtctgccgtttcttcccagtcacccaatccctgacggtcactgctacgaggatacttattagcaaaccagccgtcatccaacagaaacatatccactcccaatttggtagcctcatctatcagaccgatcagtttattttcatcgaaagtaaaataagttgcttcccaattatttaataaagtcatgcgtgtttcaccacccttctttacctgatgattgcgtgcccaatcatgaaaactacggctggcctcacccttaccctgacaactataagtgaaatagaaatccggagtacggaaaacttcgttggcgggaagtttatattcagaagcatacgggttaataccactgatgatgcgcaactcattcttattgtccacctcgaaaataaaacggaaattgcctgtccatcccaaagtacctacaagcacttcacctgcattctcctgtgaaggattacctaaagacagttggaaaaaaggagaaacaaacaaattggcacgtgtacccaattttgtatccaccactttcttaccaaaatccagttccctttcggttatattggcttcatgtgcccagtcgccggaaaattcagtcagaaaatatctgctactattcaggtgcagcatggaagaagcgtatttactaagggtaataggtttcttctcctgatggctgatttcactgaaagtacggatgatattctctttgccgtaagctatataatgaagcttcaccgtaacggggtatttatcatctttgagtgtaatcaccgtctcgttgactccgtcacctttcggttcgttcgaatgctccacatacttaagcagcaatgaagagttgttatcattatgccgcatgtggatagccggttcaaagtaatcttccataccatgagtcagataagcttcggttccctgcggaagaaattgtatatcagagtcatggttcagtcttttaccaagatacttctgatacaaacgcccgttatcccccacctgataaatcaggctggtccgttctgtttctatcttaattagaggcctatcggaagcctgtaaaatagaaatagaacccaataacaaaaaaaataagaatgattttagtttcatagtatattagattctataattttataatcccaacttagccgaaatctccaacatccgctgaatcggcttcactgctttcttcgctacttccggatctaccgttatttccggtgcttcattcttcaaacactcatagagcttctctaacgtattcaaccgcatgaagctacactcgttacatccgcacgtactatcgttcggaggagcaggaataaacgttgtctgcggacacttcttttgcatctcatgcaagatacccgattcggtagccacaatatacgtgttttccgggtggttcacggcatacttcaacaaagcagctgtagatcctaccacatcagccagtttcaaaactgtgctcttacattcgggatgtgccagcactaatgcttcgggatgctgcgtcttcaattccacaatcttttcaacagagaactgttcatgcacatgacaggcaccgtcccaaagcaacatattccggttcgtaactgagttgatataattccccagattcctatctgggccaaagattattttctcatcttttgggaaactttccacgatctgcttcgcattggtggaagtcaccaccacatcagtcaccgctttcaccgcagctgttgtattgacataagaaataacggtgtatcccggatgctctttgacaaactgcgcaaactgatccgccggacaactgtccgccaacgaacaacctgccgccatgtcgggcaccagcactttcttgtccggacaaagcacttttgccgtttcccccataaagtggacgccacacatcacaataatgtccgcttccgttttggctgcccattgagccaatgccaaactgtcgccaacataatcagcgatgtcttgtatttcccccttctggtagtagtgtcccagaatgattgcattcttttctttctttagctcgttaatagcctttatgagttcattcataataatattcttatttctttccttttaaaaaaaatcctttgttagtgatgatagcctgttaataatgttagcaaataaatatgatttttcttgccggataagttattagtccatatttctgttttatgagttggttatgaactgatgtaaaggacaagatattctatcctacttacttcattatcaatgaaagcatcgttaaataccatcaaatggaagtttgctattaactccctgttgataaagtgcaaagttaaaaactttatggatataaacaggcagataagtgctgaaaaatatgtttatgtctgtgtagaaagttttgggttagttttttggaatgttcataacgaaggcctcttataccttcttttgaataatgcaagaattatttttcaaaatctttgccgatagttttgacaggttttaaaccgttatcaacaccttgttaactgaaaagaattacctttgtggacaagaacatagtaaaagaaaagacgtatgcgtaaactgaaaataacagaactgaaccgtatcagtgccgaagagtttaaacaggttgaaaaactgcccctggtggtagtgctggacgatattcgtagtttgcacaatataggttctgtgttccgcacttcggatgctttccgtattgaatgtatctatctgtgtggtataacggccactcctccacaccctgaaatgcataagactgcactgggtgcagaattcactgtcgactggaagtatgttaataacgctgttgatgctgttgataacctcaaaaacgaagggtatatcgtttattctgtagaacaggcggaaggaagcattatgttggacgaactggaactggataagactagaaaatatgctatcgtaatgggaaacgaggtgaaaggggtacaacaagaggttattgaccattcggatggttgtatagagattcctcaatacggaacgaaacactctttgaatgtttccgtaacaaccggtattgtgatttgggatttgttcaaaaagttacgttaatagccataatataggattggttaataagttgtttataacgagttaatagcttagttaattcagttataatcaataactatgtattgtttataactatatggagccatgttgattctatgggtattgggtagttattattatagttgttgatagtgcgttttcaggctgttaatacttgagttgtcaggtattaacagcctatatgataagtattaatagctgggaactcaagtattaacttctgagaaaacagaaattaataccttgcaggaagcttgttaattcttgaaatgataactagtagggttgagtagttgataaattggcttataaggttgataaacttataagccgattgattttagatctgtccgttctctaccatcaacaccacacgttctgttagtttatcctcaccttgcggatcatattctttttttaaactggctccgaataatgcagcaaaagtctgatagaatcccgctttgaaaggtcccataaatgctttcaccagttcatagctggtagaattgctttggcggtctattaatttaatcaacagttttccctgtgcaaaagaaagtttcttcattcggggagtatattgctctttcaatcctttttcaacccgtttgatatgtttttgacgggctttctcattgggtaatgtctgaagatattcgtaagtttcgatgatggcttggttaatttctctggagataggatatacctttttcacattgcggatcaggcgataatattcctggcgttctttttcattcttgaatttcaacggacggaaaatatacacagttcttaactggacacatggaatggtatctccattgtagatacacatcggaaccaaatatccattgatgctttgtttttcttgagcttgcaggcgcaacgaacaacaaacaatagcaaacagcgtcattactactatgttaagcctccttttcacgatacaaaaatagaattaaaattttattattcagacatttctcttcgatgttaacctatttaaagtatctttgcggccttatctgttaaaaagcaggaagaataaaccattttattgatgaaaactattcaacttttacggttgataagtattataaacagcctgttaataattcctgcttgtagtgctcaaaacccttctgaaagtcttttagaagatgttcttgaagatttatctgttaataacgatattaataactctgttaatactcttaattgggaaaatgaattggaagaactttccaatcgtatgcaagaaccagttaatttgaatgttgctacccgtgaacaactcgaacagtttcctttccttagtgatattcagattgaacatctgttggcctacatctatatacatggacagatgaaaaccatctatgaacttcaactggtagaagagatggataagcaaacaatccagtatttactgcctttcgtctgtataaaagctattaacaatgaatctgctttccggtggaaaagcctgttgaaaaacgcagcgaagtatggaaagaatgaactcttaacccgctttgatataccattttataagcgaaaaggttatgaacatacctatttaggaccttctgtttataactctgtgaaatacagtttccggtatagtgaccggctctatgcaggagtcgttgctgaaaaagatgccggagaaccttttggagctttacacaatcgctacggctatgattattactccttttatctgttattaaaagattgtggacggttaaaagcattagctgttggtaactatcggcttagtttcggacaaggattagtgattagcactgattatttgatgggaaaaacaatctatgcctcttctttcaacaatcgtaattgtgggataaagaaacactcttccagtgacgaatacaactattttcgaggagtagctgccactgtttctttgacaaaagattgggatatttctggtttctattcacaccgttctctggatggagtaatcactgatggaacaatcacttctatctacaaaaccgggctgcatcgaagtcaaaaggaagcggataaaaagaacctgttcaccatgcaattaacaggtggacacgtgagttatcaacacaaccgtatccgattgggtatcaccggtatttactaccttttcaaccgactatacgaaccggaattaacaggttattccaaatacaatcttcatggaaataacttctataatctgggaatagattatgcttaccgctggcatcgtttttcttttcaaggagaaacagccatcggaaaacaaggttgggcttctttgaaccgtttgcaatattcaccggttcaaaacactcaaatcatgttgatacatcggttttattcttatgactattggactatgtttgcccattcattcggtgaaggaagtacgacacaaaatgaacagggatattatatcggcttggaaacttctccttttgcttattggaagtttttcgcctcattcgatttattttcctttccgtggaaaaaatacagagtgaataaaccctcccgcggaacagatgctctgttccaaaccacttttactccatacagcaatttatccatgtatctaaggtatcgttataaacaaaaagagcgtgactggacaggtagtaaaggaacactaacacttcctatttttcaccatcaacttcgctatcgtttgaactattctttgggagatgtgttaagcagtcgtacaactttagattataatcattttcattctcaggacagagctgctaataaaggatatcaggttacacaaatgatatcctcccaactgccttgggccaggctgtttgctgacgttcagggcagttacttttttacagacgattatgactcgcgtgtatatgcttcggaaagcggattgctttatacgttttatactccgtcttttcaaggtcgtggattccggtgtagtatccgtttgagatatgaactgaacagacactttctattgataaccaagtttggagaaaccatttatttagaccggaatgagattggttccggcaatgatttaatctatggaaataaaaaagcagatgtacaaatgcaactacgtattaagttttaatgtatatttgtctgccagaaataacagaagaatacgatattaaatggatgacagggctacttttgacaaaatgtttaatgaatggtatgcacagtttgtatattttgcatactatttcataaatgatgctgaagtatgcagggatatcgtaagtgatgcttttgagtatttgtggcgtaattatgaaaagatagaagaagcaacggcgaaaacttatctttatacaatcatccgtacacgttgcatagattaccttcgcaagcaaaatattcatgaagaatatgtagagtttactacgcaattgactgataaaatgatagaaggcgattcgcaaaattctgattctcgtgttttgcgtattcgtgaagctatgaagaagttgactccttataattatcatattttggaagcatgctatattcataataagaaatataaagaagtggccgaagaattaaatgtaagtgttgcggctattcataagaatatagtaaaggctttacgtattcttcgcgaagaattaggccaaaagggtaaccggaattgactttaaaacgtaaatatatatagattgaatacattatttatggatgaaaagaatataaacctcaaatccgcaactacgcgcctaatatgatacagaagcgaaaagaatctgcatcgttagtaaaaagggggcacagtgcatcgaatgtcaccataaagacatataaatgccccttaccccaccatgcgacttgaggcaatacgcaaaatcacgactataagttgtcggtgttatccaaagtcattctggaacacattggcataagcattgttgcatgaatagatattcagcacatacttccttgatgtcctgacccatttggctggcacagagatgaacttaaagacaaacgtcttgatgcggcttgttgctttgagtccgaacctcttcacgtcaagcctcgccatgatgaatttatagaagttgcgtatgagtgccataagcagaagaaacaccgtgttttctcccataaaggattttggaagcctgttccagccgaatccgttattcatatcatcgaagatgcgttccttccctccacggaggttatagaattcgacaatctctttctcggaagactcgtagtcatttgtaaggatgcagcggtaggtgtattctccttcccacaggtcgagttcgccgtctatccgcttctgtctttgaatcacaagacggtatgccttccctttccatttctcgatgagaatggaggccagctcaaactcaatgccgcccaattccactttcttccaacctctgagggcaaagatgtcattgtagagcgaactgcatcggttagcacggatatagaaggtcttgcagtgtttagcaatctcttccactatctcttcagaacacgagccgcaatcagctctgaaacggttgataataagcttgttttgttcaaacctttcaaagaacctcttcagcgtgtccttctggtggaaacggacatttgtgttgccgtcgctgttctcaatgccgacaatcaagttgccaataaccgccacgccagggcgataaccaaggaacttcttgtatgtaggcttcgcatcaaacttctcagcctctatgaactggtggtcgaagtcaacgtcatacccctcgccctctttcagctgccctgtggacaataggcaattgaggagcagtgtattcagcttgtctgccgtgttgaagtcgtaggtcttgccagtgtcggatgtgtaggaaatgttatcctgggtcagttcctttatggctctaagaatcgtgtcggcactgcatgtgcgaagtgtcggatgaagcgaaaggtggtacatcagatgagtggtgacatcctcgatgcatgagccgccacaaaaataaacgctcataagcgaacggatgatttcgctgtattgataaccatacagcctgcatctcataccgagggttgagtcgattacagatgagagtctggagtcaaattgctccattattgaaaatattcctccaaaaggagtgagtttctcggatttaattgctacctttgccatgtctgtcgggtttgatacatattttgatttgcaacactaagataggtgaaaaatctgacatggcaaattcctgagcaactttttgttgctcaggtacttaaaaagttatatttgtaatagtgttgcggaattaaggataaatataagcaagtcggaagaagaactcctggaaattatggagaatcgttcgcgtataactgctggtcaattgcataatttggaagaagatgaggaatgtttgcaagcatgttctgatttgacggaggttgtgatagagatgcagaaagagcaaaatttactggcaattgatgtccggaaagaactggcagattttcgtaataaacattctaagaatgatcgaagaaaaaatacacgcatactgtgggctagtgtcacaggtgtagcggcggctgttgctatcattttagttttgcgtgcaatgatgatttcctcacaaccggaaatcattaaagtgtttcaagccaatcatattgcccgggaagtcactttacaagtgaatgatgagaaagaaataaagccattgaaagaagtggtagaatctctttcgtcttactctactgcgcagttgtcttctaaggaaatagattatagtcgtgttctccttcagacagaaaccaaggaagtaggaaaacagaaagtacagatacatagattaagtattcctagaggagagacatttaaagttgttttatccgaggggactgaagtattcttgaattcagacagtcgtttggcttatcctactgttttcaaaggaaaagaacgagtcgtctctttggaaggtgaagcctattttaaagttgctaaagatgcagcacatccttttatcgtgaaaagtggaaatctgcagattcgtgtattgggaacggaatttaatgtacgtagctactctcctactgatgtccgtgttacgctcattacaggaaaagtggctgtgagcgatacttgtggagtccatagtgttgaaatggtgccaggacaaagcgtacaactttcttctgacggaacatttgccgtgaatgaggtggatattgaatcatttttgtattggaaggaaggatttttctattttgacaatgttgctctggttgacatgatgaaagaaataggacgttggtataatatagatattgagttccgcaatagcaaaatcatggatcttcgtatgcatttctttgcaaatcgtcatcaggacatctttcacttgattgaattattgaatcgaatggagagaatacatgcttattttgaagcaggaaaactaattatcgaataaaaagcaagcaaaaagatataaatctgaatagaaaaatatatttctgaaaaaaaactattttaagggtaaccattcttttttaaacttcgtatacaattaaaagaatgaaatattatttaactattcaggcttatgaaaagaaatcaggcacagaagttcattgttttattcttgcttttcctttttgcctattcatggcgtgtagaagcacagacaggtaaagaaaagcaaataacaatggagtttaaaaatgaagggttaccctctatttttaaacgttttgaaaaagtatcggggtataaagttctttttatctatgatgaaattagctcttatacttctaccggaaaagtagaaaaagctacagttgatgaagcgttgaaggtgattattggaaaaaatccgttgaaatatcacattgacggacaattcatcaatatcacacaaaaggattctaaaaagtttttttcacaagtaaaaggaaaagttctttccgaagaagacgggcttccggttattggcgccactattatagtggaagatcctagtaataaccgtactatcacagacaataatggtaattttcagctttctgatgttccgaaagatagccgtgtcagaatatcgtatgtaggtttggaaacccagtttttgcatccttcatcttatatgtcggtagtgatgaaatctgatacaagggcgctggatgaagtagtggtgacaggtatgttcaataggaagaaagagggattcaccggttctgctgttactatcaagggtgaagacctgaaaaaatatagtacgaataatgtggctaaagcgatagctgctgtcgctcccgggcttcgcatcatggataatatcaatatggggtctaatccgaataatctgcctgatatgcgtatgcgtggcggtgcaaatatggatatgactacacagtctgcggtagattttaattctaccagtaatgacgtattagcagttcagggcgaatatgagacctatgccaatcaaccgttgcttatcatggacggatttgaaatcaccatacagacacttgccgatatggatcccgaccgtgttgcttctatcgttgtgttgaaagatgcggcagctacagctatttacggctcgcgtgcggcaaatggagtaattgttatcgaaagcaagactcctaaaccgggacggatttgggtgacttatggtggggaacttcgtattgaagctccggatatgaccggatataatttaatgaatgcaagagagaagatagacgcagagttgcaaagcgggctttatacatacggtggcgagacagttgaaaaatggcagctctatcaatcaaaattgcgtgaagtgctggcaggagtaaatacttattggctggacaagcctttgcaaacagctttccaacaacgacatacggttacgttggaaggtggtgacgaagccttgcgttatcggatgtatgtcggatataatagttctccgggtgtgatgaaagacagtaagcgtgatgtattgaccggttcacttgattttcagtatcgcctgaaaaaagtgttgttaaagaatagtattacgttggataattcggtggctaatgagtctccatggggaagttttagtgaatatacccgcttgaatccttatctgcgtccgtatggagagaacggagaaatacaaaaacggcttgataatttcgaaggagtgggtggtgagtcgagctacctgaatccgatgtataatacgacattcaacagtaaagaccaaagtaaaaactttacggtacgtgaacttttcaaggtggaatataatcctactaatgaattacggtttgaaggagcttttaatttgtccaaaagcgtaggacatcgtgatatttttcgtcctgcacaacatacgctttttgataatgtgactgatcctaccttaagaggtgattaccgcagaagtcagagtgaagctgtcaattggggcatagatttaacaggaagctggaataagcaactggaggatcactacctgactgctaatgcacgtatgagtgtattggagaataattcggagacttatggaaactatgtgactggtttcccgaatgataatatggataacttgttgtttggtaagaaatataatgagaaggtgacaggagatgagaggacaacgcgctccattggttgggtagctgctggaggctattcttataaatataagtattcgttcgactttaatatacgcttggacggttcatcacagtttggaaaaaataaccgttgggctcctttctggtcaaccggattacgttgggatttgaaaaaagagaactttttgaaagatgtatcttttatttccgattttatattgaggggtacatacggtacgaccggttcccaaggttttgatccttatcaggcacatggttattatacatattccaatttactgcttccttattactcgtcggatgcaacaggttcggaaatcttggctatgcataatgaaagtttaaaatggcagactacaaaaagtactaatcttgccttggaactcggttttttcgatcagcgttttactgcacgtgtggaatattatcggaaaataacagataatatggttgccaatataagtcttgctccttctcttggtttcagcagttatccggaaaatctaggaaagatagagaataagggttgggaaatttctctctcggctattccttataaaaacactgctaaacaagcttattggacaattacagtaaacggttctcataatactgacaaactattgaaaatatcggaagcgatgaaatacagaaatgataaaagtgcatcagatttaaaagatacgccgttgccacgttatgaagaaggtgaatctctttctcgtatttgggtagtacgttcattaggtattgatccggcttccggagatgaaatattattgaaacgtaacggagagatgacgagtgccgttaactggagtgcgaatgatgtagtacctattggtaatacagaacctaaatggcaaggatatattaattcttcctttacatacagaggttggggagcagacgtcagtttcaggtatcagtttggcggtcaggtatataatcagactttgcttgacaaggtggaaaatgctaatttgaaatataatgtagatcgacgggtaactcagctacgttgggcgaaaccgggtgataaggcacagttccgtgctcttaatcctaacggtttggaaacgaaagccacttcccggtttataatggatgaaaatatattccagggaagttcgttgtctgtttactatcgtatggatcgtactaatacaaaatttattagtcattggggattgagttccgctaaagtgacgtttaatatggaagactttttctattggtctacagtgaaacgcgaaagaggtttgtactatccgtattcccgtcagtttacatttgctctgaatgttgctttttaattaaaaacctatttgtatgaaacagataatatatatactattaacaacaacaatgctgggacttatgtcttgcagcgactggttggatgtatctccgaagacttctattcctaccgacaagcaatttgagtcggaatcaggatttaaggatgcgcttacaggtatttatttgaagttgggaaccacgacattgtatgccggagacttgacttatgcttatttggatgagttggcaggattatattccgattatccggggtataatacaaatgctgttttcgaccaaagtatcgtgttcgattatgagaacatgtttttgagtaagaagaatgggatttactcaacgatgtataacatcattgccaatattaataacttcttggagtatgtagacaaaaataaagatgttttagttaccgaacgctattatgaaactatgaagggagaagcactcgggcttcgtgcttttcttcattttgatttgttgcgtatgttcggtcctgtttataaagaacatcctgcatccaaagctataccctaccgtactacttttgataaagatgctactcctgttttaccagccagcgaagtggtagacgctattctcaaagatttgaatgacgcagaaaaattactgaaagagaacgatcctcttgatttttttaccgaccggacggatgaagattttacagagaaagatcattttcttgtcaatcgtgaatttcgtatgaatctatatgcggttaaagctatgctggcccgtgtatattgttacaaaggtgatgcggaaagcaaaggattggccacggagtatgctaaacaagtaattgccgcctctaagtattttacattgtataaatcgcagactgcttccaattacaattccatacgctacgcagagcaaatctttggaataacagtcaatgaattctccaatttgcttattggaaattatatggatatggagaataccaatactcagcaacatttctacctggatggagataaatttaaattcttctatgaaactgccgatgcagggaatactgactggagaaaaaatacggaaatgtttgaggttattaatggggcaagtcggacagatgttttttgtagaaaatataatcagaaacctttgaatggcggatatgcttattccggtgctgacgctatccctttgatacgcttacccgaaatgtattatattgtagcagaatgtgttccttctgcatcggaaagtgctgacgcgttaaataccgtacgttttgcacgtggtatctcttatagtgatgaaataccgactaccggatatgatgaccttgataatacttcggaagaagacaaaaatcagactaaacgtattaatgagataatgaaagaatatagaaaagaatatttcgcggaaggtcaacttttctatttcttgaaagcgcataattatagcacttattatggttgtgggattgaaacgatgactgaagcccattatcagatgacgttgccggatgacgagtatatttttggaaacaactctaaatgatgaagcattatgaaacgtattatatattttgttttagctattcttgtttgcggcatttatgtaggatgcagtgaaaacgagatagacttatatgaccagacacctcgtatcaatttctatggtagcactacgcatgtccgtactttggttgatacggattatgtgaagaaagaaccttatgctgtagacagtttcgaggtaagaatacaaggagattttttgaaagagaatcgtgatttctgtgtgaaagtaactccgaataatgattatcagaattcagtggatgtattattggaaagcaagtatacatatactgaccttgatacagtttgccagatattctattataaaataaatcgtccgaaagtagaggcaggtagaaatgtttatggttgttatctggagtttgatttgaataaccctcttcatcagtttgataaaggtctggtagaaaagaatcaaatcgttttaaatgtcagatgggagttgaaaccgactgaatggagtgattatgtgggatttggtagctatagcgatgctaaatatatgtttattatggatgtatgccaacgtgtatgggatgatttggaagatgaagatattgatgtaatcaagcaagcttatagagaatataaggaggcggggaatccaccgattttaggtgaagaaggtgatgaaatagaatatgaacaagattaaaaagaaacgttatgaggaaatatatcatctgtatagtaagttttatcggaacggctttattgcaagcaggctgttacgatgacaagggagattacgattatcatgatgtaaatacgatggatatcgtaatacctgaaacgaaggtacgtatgcctaaagaggaagcagtggaagtttcaattatacccgagatttctcagactttggagcaaaatgaggaaaaccttgtgtttcaatggaagaaaacaatcgaaggaaagaaagcggggtcggacagacttagtgattataaagattattccgtaggcaaagaatgtaaagtaacagtcgagccttatgaatcggaaaatataggtttaatgttggtcattacggataaaaagagtggaacaacttggtatcagataggtgaagttgcaattattcgtcctttaaatccttgctggtttgtattgcaggaaaaagaaggaaagggagtattaggagcgatagagggtactccggaaggatattatgtttatccggatgtctttaaatcagaactgaatcagtcatttccgttagaaggaaaacctttggcggtaagtgcaagaaaaaactatggggattcgtatttgagtagtatgctgggtttttttggttttaaagtaagtccggcgttaatggtggtaaccgatcaggacttggccttattgactccaagtactttaataacgagatatccgtcaaataaaatactttttgaaccggcgggaaaaggggaaccgttgaatattgagttttataagatgagtgctcatggtgaattgtttgtaaatagtggaaaagcatattgtgctcctatggatggattttgtgtaccattttcggtaaaaaaagaaagtgagtttcctgctatttccgcttatggttcgtatggaggaggctttttgttttttgattctgaaaatcatcgttttcttagtgcatctattccgggttgttatgattatatgatgaatcaggctactcaagaaatacgtaactatggtactaaatggagtgaccagaagcctgtatccacgtattcaatgtcagacgaatctaatttgtttgatccggatgtaattgatccatctttagaagtacatgatattgttacgggtggaaattggggaaattttgcttatgcgattgcttctccccggaacggaaaagagctgactgtgtttaaattcagtgcgcaagatgaagatccgatttgtgctgcccggtatacaattgctttaccgtccgaagtaaatgtagaaacagcaaaatttgcagcttcttacgcgtatacggcaaaccttatatttatgacatcgggtaataaattatatcgcattgatcttgaccgcggaagagcaattgaactttatacttatgaaattgatccgtcagcacagatagctagtctaaaatttaaggaccctgaaagtgtgagagaggaaggtgacgatgaggaaacgggcgaatataaggagaaattaggcatgtctctcgggttgggtatcaatactgctgataaaggtgtagttgtagaattgcaattgacagtggcgggtgatgtagctcgtgaagaaaacagcatttgtgtttacgaagatcccgatcagcctattgggaagattgttgatattagctataattatgaatagtataaaccggtctttatgctaaaaggaattatcggtgcagtatttcttgctgttgtctgtacttgtctgtacgggcaacagcaaagtattacaacttttattaaagaagaagcaccagtggaagttattcccggtatgtttactacctaccgaagtgataaacatatctattgggaaatcccggattcattgattggacgtgagtttgccgtaacgacaactatcctgacagctcctgcccgtccggaccgggatatggaaaagaaattcggatatgcgggtgacatgataggtccggtatttttcagtttccgtaaacagggtgacgagttgtggatgatggatccacaatatgaaagggtgatagaaaatcctgaaggaacgtatgcaaaaatcgccgcccaacgtgggaatgaaaggctttataaaatattaccgattaaagctaggaatcagggaagcagcctgatagagattggtgaagtattaaaagattttcctttgtttactcttgatattgtatcttttgatttattgataggtacgcgttcaagagagaaagattatattaaggaaattaaaggatatgacaaccgcttgttgatacacgcatcacgagcttatcgaagttcgtcaatgaaaataccaggtaagcctgttgcatctccttatattggagactgggatacaggtatctgcataaaattactgtcaaaaagaccgttggaggcagttgctgcaaataccggagcttatttttctatcagcaaggagtattttcaagggaatcagcctgctattcggaaatctgttgtcaaacgatggcggctggaaataagggcggaagatgaagaaagatacatgaggggggaattggtagaacccatacaacctattattttttatatagatcgtaatacaccggaaaagtacatcgactgtatcattgaagcggtgcgtgactggcgtccggctttcgagaaagctggatttaagaacgccattgatgcgcgactggctcctaccgttgaggaagatcctgattttagtatttatgacagtacttatccgttcatctcatggaagatatcaggacaaaataacgcttatggaccgactccatgcgaaccccggtccggtgagattatagcttgccacatcggtattttttgcagtgtcttgaatttggaacagaaatggtattttgctcaatgtggagcgaatgatccgcaggcatggaatatagagctgccggactctttgcaatacgaacagataaaacaagtgctgacacatgaagtaggtcatacattaggattggaacataactttctgggtagttctcattactccatcgatcaattacgtgataatgactttttaagtcaatatagtattggtagttccattatggactatgtgcggtgtaattatgctttacgtcctcaagataaagttgatttgagaaacaggaggatacgtgtcggtgaatatgataagtgggctattgaatggggctaccgtatatttccgggtaaagatgcttctgaaagagaaaagaacaggaccctttggaatcaggaaaaacagaaagatctctcattacatttttcgggcagaatggatgtaagagcccaggcagaagatttgggtaatgaccatgttatggttaatacacaaggaatagagaacctgaaatatttgtgtgaacatccggatgtctggaatgtgacggataaaacgtctttgcgtgtattacaggggcgttatgaagcggtattggagcattataaacagtgggtacagcatgttctgtcacatttaggtggaaagcgtcttgctgagccggatgatgagaatatttacatacccgaaaaagccgattacaataagaaggttatgagctttatacaggcttatatattacaaccgcctgtgtggatgtttgatgaaaaacttaccgctaaattagaaatagacggtagtcgggagttcgatcgcttttatgaagagctgatgtcggaaatgattcgttccctccgggaagtggaaagaacggagaatgtttgtgaggatatgttgtctgtagatgagtttttggaaagcatacataaagaattatttaccgaatgggctgacaatattcctgtaagtgacgccaagtataaagtgcagttgctttatgtgagtaaacttgttaaattgttggatagatcagaaaagataacttcgtcgagattattggtttccatcatgcaggctttgaatagaataaaggaggaaagtcttgattatagccataagattacggatccggttgccaaaaaacgggcaatgtttcttgtagatagtattttgttttaatgatgaaaagtaaataaagaaattcatgaagagaagaagatatgtgattggtgtattgttgtgtgtcacagctttgcttcaggcacaggattccgtcaagtcatttgacgagttttttgttgccgggatggataagatcgacggtgtgtttcctgtgtatgtagcggaaaaagaaatctatttggaaatacccgaaaaatatatcgggcgggaaattgaagtcagtggacagatagatcgagggtttgatttgttgaatcgtccggttgacggactgggagtagtgcgtattatatctccggataaagctacaatttgctttcaaaaaccgttttatacagagcgtattttagatgaaaaaagcacatatcagcaatctttctcgttgtcaaatatgcaacctgccggtaaaagttatccagtggtggcctattcaaaagagcagggagctattattcggataacagagtatctgatgactggcgatgactggttcagctataatgatagttttattcgttccttggttccggaactgtcggaaataatgaaaatacatccttttaaggaaggtgtgtcgtttacggtcaggcgctatcatggagttgaagcggaaagatatatgctgtccagttctgccgttctattgcctgaaggtagtatgcctttggaagttacttgtgtagtacgcttgctacctctgaaaagagatcagatccgcctggcagattacagaataccttaccggacattgagtttcaaagattactcgcaaaatccttattgtatggtagaagattcattgattcttcgttgggatatgtcacaaccgcttgctttttatgtagataccctttttccgaaggaatactttcaggcagtaaaggaaggagtggaagcatggaataccgccttccataaagcaggtattcatgatgctttacaagtaaggtatgcagaccgaaagataattccggcggaacaacgtgcttttatatcttatgatttgagaataccggggatcaaaagtgactttatctgtcatcctcgtaccggagaaatactttcatgtcgtctgaatatcggacatggattcctaaaaggaaaattagacgactatctgttaagttgcggtgcctcggattcgcgtattctggctgaccgttattctaaagaagtggaaaaagaattgttgcaaaatgaaataacggaggaaattggatatcttttaggtttgcgcagaagtttatcgaaaagctcgtgtggaaagactttaaaagttggagatgatgattgccggactatttattttggctatcatcctttcaaaggagaccaaaattgttatgatgaacgggagaagctccgccaatggatagagcataatttaccagatcacattcgtttattccaaccatcaggggaggagaattctaattcttcatttccagaagattatacggtcaaaatattggatttacagactgtagtgagtcggttggataagattgtgtataaggggaagaaatacgataaagggagttcgctcactgatatatacagaaaggctattcgtctgtatgggagttatctgatggaaatggcaaaggtggtgggtagttctcaaccggcagatgcgcagcgtcaggcaatgcttgatttggacaactatttatttcattctgttaaaaagatggaatgtacctatgtaaaagagaatttgttggaaacaagaaacaatcttctgtatccggaattggcgaagttgttcaaacaattgttgagtgtaaagacaatttcagctcttcgattgcaggcgttgcagagtgaccggaaggggtatgacgatattgattttttccgggatctttataaaggattgtttaatggttttgatccgcagtctgccgttagttatgaacagatggatattcagctgatatgtttggaagcatggctggatattatgcaggaagctactgaacataatagtataaagaaacgtttaacgaacgaattgcatagtctgcacgatagactggaggagcttagcacgatacattcccaaaaggaagtacgtgatatgtatattctgcttttgagaagaatggatcaatatttccgtgcggtttcttgagtggcgttagagtaattatttgtttgggatgatgaaaaaatggtcgtacagatagaataacctataagttttgggctatctttgctatgatttatgaataaataattagaataagatgactattatttttccttcacccatcttcggccctattcattcccgccgtttgggcgtttctttgggaatcaatttattgccggacgacggtaaggtttgttcattcgactgcatttattgtgagtgtggtttcaatgccgaacatcgtacgaagaaacttcttcctacccgtgaagaagtccgcacggctctcgaagagaaactaaaagacatgcaggcaaacggcactgctcccgatgtactgacatttgccggaaacggtgaaccgactgcgcatccccatttcccggaaatcataaaagatactcttgcgcttcgcgacaggtatttcccaaaagcgaaagtaagcgtattgagtaactctacatttattgatcgccctgccgtattcgaagcactgaacaagatagataataatatcctgaaactggatacggtggatgaagaatatattcatctgttggaccgccctaacggaaaatattctgttaagaagatcatcgaaagaatgaaagagttcaaaggaaactgcatcgtacagacgatgttcctgaaaggaggttatcagggaaaagacatggataatacatccgacaagtatgtgctcccctggatagaagcagtgaaagaaatcgctccccgtcaagtgatgatttatacgattgaccgggagactcccgaccacgatttgcaaaaggctacgcatgaagagttagaccgtattgtggctttactggaaaaagagggtattccggcaacagcttcttattaagaaaataattatattgtacgacatctggatgttggtatattgaccctcggatgtcgtacaatatattttagtataaatgagtattctctaatataggccgtgcaattattaatgatgttaattgaagcaaaaaaggatatttggcaccaatatcgactttataaaatacgcaatttattcttcccgcttgtcagtttataatagaaaccgatgcagaaattatataaagggtaattttggttataaattatattaccagaatcatctttcggttcataatctggccgtagacgggattcaaatttttcacgcggatagatgtaagcgccatcggcatttttaccatccaggtcgatatatttgtagaatcctttagaagaatcactgtcacgtagattaccgtgtccttgcaaatggtttagtccctgaggttggttctcgatgcatgaaccggaaccggcgtacatgatgagtacatcaccttccagcggtttatcacaggttaataccactttatcttttccattcaattctacttttgtaatgtttatccgattgccggagcgtgctttgtcctggtatacttcaaaaccgtaatcgcggattttgggcagggtattcacatcaagagccaatggcggtacaggtacatgaaatcggatctgaatctttcccgttgcacggtctagcagaatttctttaggttgtaagggtttgaagttctttccttttatttgtgtttgatagtaaacttttcctagcatttcgccgaaccaacggtagccattggcatcaagatgtcctcctctgtctgtcatcggatagatagggcctgcgcagatgatatccttatattcgttagaagcttcgagttgggccatcgaaatggcaagtgtatcgcgcatatattgtgctcctgtctggtaagtgatccataccggtttttgcttttggtcatatttctctacgacttcgttctgcatattgtttttcagattgattatcagcttcttatactcctgtctgtcaagtgtgttgggttcattcttttttagtcctttctccggattggcagtgccgtagttgaactctccctgcatccagaaaatgaccggacactgtacgaagtctccctgtatttcggtaatctgagaggctaaagagacggctgtctcaaaatccttgtaatgtgtacgtgtttccgattcctttgacagttcttccacgctggcgccactgaatcctactgaagtagcgatgattttatccattttcggttttttgagccgaacataattcactgctcctacaagcggtgattctgcaaatgttcccgctgatctgctcatcacatccttaccttggcggaaagggattgcaatgcccactaatggattaagttgcttacggtgcaaatttccgtagttaatccacacttggttgctgatcatatagtttccaggtacattttcggtagatagtgtcggataagactgatggcctgtggagagactctgcccatccatgatgaagtgcatatacatctccggtttcttcttgtttccatctttttctaaagagtgattgtctgccatggtttcgcttgtgcagaagccgagcagaacgaggcaaattccggagaacagtttaaattttttcattgtttctttttttgttagaagttgataaattgtttaatgcgaaaatagaagtggatacttaaaaaagtaatcttcctgctattaataagtaattaaaatacggttaataagttttatctcgacattctgaaccgaaaatatccggaaatgcaatttattaattgtttattaatgtcctatttcgataaaaattaagtcgggaatcttatttttgagcaatcaatatatcggaaagcaaatataattgtataatataaaactaatatcatgagaaaagtgaactatattttaataattgcgatttgtgtgattcttaattttttgtccgtggtaaatgccaaaacaacagaccgtaattttccaccccctttgagagctacttatgatactcctgctaaaatatgggaaagtgaggcgcttcccattggcaatggatacatgggtgccatgattttcggtggtgtttatgttgatgttattcaaacgaatgagcatacattgtggtcaggaggtccgagtgaaaatcctggttataacggagggcacttgaggactcctgaaataaacaaggataatcttcagaaagcaagaaacttgttgcaacagaagatgatagactttatggccgacaaagccgcacattttgatgccaacggtaaactcattacgtatgattatgaaggtgacggcgaagaaacggatttacgcagatatatagataatattgccggtacgaaagaacatttcggttcatatcagaccttgagtaatattgtcattacttcgaacaataccaagtgtccggattgtgcttactctgattataatcgtacactcgatatagataattctatccatacagtcagttataaggagagtggcataacttataagcgtgaatatttcatgagttatccggacaacgtaatggtaatccggttgacatcagatagtaaagacggtatttcacgtactattgcacttgaatcactgcacaagactaaaaacatcatatcagaaggaaacaccattacaatgacaggctatccgactccggtgggtggagataagcgtgtgggcgatcattggaaaaatggattgagatatgcacagcaagtaatggtcagaaatgatggaggtaagatttcagcagtagacggtatgattaaagtagcgggagcgaaagaaatcgttatccttatgtcggcagccactaactatgttcaatgtatggatgatagttacaacttcttttctaaggaagatcctttggataaggtgaaagctattctgaagaaggcgtctgcaaaaagctataagaaactgttgattgcccatcaaaaagactatcgcagtttgtacgaccgtatgaaaattaatctgggtaatgtgaaggaagcgcctgtcatgactaccgataagttactgaaagggatggacgaacgtactaatttgcaagccgataacctttatctggaaatgttgtactatcagttcgggcgttacctgctcatctccagttcgcgtgaaggttcattgcctgccaacctgcaaggggtttgggctgacagactccaaaatgcatggaattcagattatcatactaacatcaatgtacagatgaactattggccggcacagccgaccaacttgagtccgtgtcatttgccgatggtggaatatgtgaaaagtcttgttcctcgtggcagatatactgctcagcattattattgccgtccggatggaaaacctgtacggggttgggtgacgcatcacgagaataatatctggggcaatactgctcccgccaaaaaggatacacctcatcattttccggcaggtgctatttggatgtgtcaggatatttgggaatattatcagttcaatcaagacaggaaattcctggaagaatactatgacactatgttgcaggctgctctcttttgggtagataacttatggacagacaaacgtgacggaatgttggttgctaacccttctcactctcccgaacacggtgaatattcgttgggatgttctacctcgcaggcgatgatttgggagatattcaatatcatgattaaagcgagcaaggaattgggcagggaaaatgatccggagattaaggaaatcagcgcatcactagccaagctttccggtccgaaaattggattgggcgggcagttcatggagtggaaagatgaagtgacgaaagatatcaatggagacggtggacatcggcataccaatcatttattctggctgcatccgggatctgccatcgttgcgggcagaagtgaatgggataataaatatgcggaagccatgaaagtgacattgaatacgcgtggagatgcgggtaccggatggagcaaggcatggaaactgaacttctgggcacgtttacatgacggtaaccgttcgcataagctattggaaagcgccttgaaactaacaaaacccggtgctaattttgggggagtatatactaacttgttcgatgcacatccgcctttccagattgacggtaacttcggggtgacggcaggtgtggcggaaatgctgatgcagagtcacggaggttacatagaactgctcccgtcattgcctgacgtatggaaagaaggttctttcaaaggtatgaaagccagaggtaattttgaagtggatgctgaatggagcaatggaaaaataacgtctgttattattacctcttattcgggtaaggaatgtattgtcaagtgcccggatgcaaagaatttaaaagtttccggtacttctgcgaaggtcatagcagatgatatgatctcattccctacttcctcaggaaaggcatataggataatagaatagaaatgaaacctctttggttgtttggtctcttatattaacttatgttgtttatagcttattcttgcttattcatatggtagcattcataatttcttctgcatagattaataacttctccccatcagttaatcaattcttctatatgtatttgttgaatgcacttgagcagcagtcttgttacataagtgcaacaaggcggctgctcaagtctgttcgggagaatgcacaagtgcaaacaaagatataaatatagggagcaatatgccagtaaataacatattgcaaaaaatgcagttttctcatggaaaaaagcaaaaacaacctattgttttctgtaaacttttcttaaaataagggcctttttaaggttaagtaattgattattaactctgtgacatttttgttttccccctataatacttaaaataagaacaaaaatgtggcggatggtttatcctccttgtttcacataacttttctgttctttatttcacatcatcccatgtatctgttctgaatgtcgaatccttccagttgttcgaacgtggggaatagtccggcacgagcattgtcgaatgctactattgctttgccgtcagtatattccacattagtcatcataggtccggtggatggcagtttgcgtactccgtaagtttgagttaatgcaagagtagcaaggcggagacctaccggttctttaggggaaggatggatacagaactcattgccgatatgttgtttccagtgaagatacttcccattttttccttcgaactctgtccgcttttgaatgtctttaattcttggtacggtgataaagcggatacgatcacgatagttaccatgttattatttattagataagattattactctacaatttctttcgctctgtccaatgctacattgatattcggacagatattttcctctcccaatagttcatagaatccggatttctccaatactttatgaactttctcgttgactccggaaaggataacggtaatcttctccttctgcgacatttcacaaagagtggtcaggttatggatacccgtagagtcgataaacggaactttacgcatacggatgatacgtactttcggacggtcacccaattgcgccattgtctcttcgaactttgtggcgatgccaaagaagtaaggaccgttgatttcatatacttccactcctttggggattatcagattctcttcgtgtacggcgatatcgagttccgagttcggatcaatctcgtccgtgataacagaaatttcggtagtctccataacacgtttcataaagagtacacaagcgatgataagtccgatttcgatggcaactgtcaagtcgaagataacagtgaggaagaatgtgatcagaagtaccgttacatccgattttggatttctcagtaaagccttgaatacgcgccatccgctcatattataggaaacgatgaccaatactccggcaaggcatgccatcgggatatattgagcaagcggcattaggaagagaagaatcagcaacaggacgactgcatggatgattccggctatcggtgtcttacccccgttgttgatatttgtcatagtacgggcaatggctccggtagcggggataccgccaaacaaaggagctacgatatttgctgtaccttgtgcaatcagttctgtgttggaatcgtggcggtcgcctatcacaccatcggcaacggtggcggacaacagtgattcgatagctcccaacacggcaatcgtgacggcaaccgggaataagtttttaatggcttcccagttcaatgtggggacaacggcatcgggtagctcagagttgattgtaaagcggtcgccaatggttgggatgcagtcaattccgccgtacatcttcatcaggtaaacggcaactgtcaccacgacaatagcaatcagtgagccgggaattttcttggaaaatttgggtgagatggcgatgataatgatactgataatacttacgatggtattccaccagttcaccgtgtcgaaatggcggaaataaatcaaccattttccaataaagtcacccggaactttctcgtctccaaacgacaggccgaagatatcggctatctgtgtggtgaagatggttacagcgataccgctggtgaaacctacgataatcggataaggaatgaactttatgacggctcccagtttgaatactcctaataatataaggagcacgcctgccatgagcgttgctacaatcagtccggcctctccatattgttggatgattccgtagatgatgacgataaaagcacctgtcggtccgccgatctggactttgcttccgcccagcaatgagacgataaatccggcaataatagcggtaatgatacccttttcgggtgatacgcccgaagcaataccaaaggcaatggctaacggcaacgcaacgataccaacgatgatacctgccatcaagtctgccatgaatgtttcttttgaataattttttaggcaagaaaccaatttaggtttgaattcaaatagtttcattttctatgagttgttacgtgatcgtttgtcttttgtaaagtagaggttgcaaaattatataaaataatcgaaagaagtatgtttctcgacatactatttgatttttgataggttttatcaatgagggcatagattttattaatgagaaaagtagggcgttttatgaacaaatagcttatatttgcgttatgaataatacgacaagttacgtgtggtaatcaaccaatttaaaatataataagaattatggctaagagtattaaaggaactcagacagagaagaatctgctgacttcattcgctggagaatcacaggcaagaatgcgttacacctattttgcaagtgtggctaaaaaagaaggttacgaacaaatttcggctatttttactgaaacggccgatcaggaaaaggaacatgcgaaacgtatgtttaagttcctggaaggtggtatggtagaaatcactgccagctatccggcaggtgtaatcggtactacactcgaaaatcttcgcgctgccgctgccggtgaacacgaagaatggtcgctggattatcctcatttcgcagatgtggcagaacaggagggtttcccgatgattgccgctatgtatcgtaatatttctattgctgagaaaggtcacgaagaaagatatcttgctttcgtgaacaatatcgagaatatgactgtattcgctaaagaaggtgaagtagtatggcaatgccgtaactgcggttatatcactgtaggtaaggaagctccggaagtttgtccggcttgtttgcacccgcaggcttacttcgaagtaaagaaggaaaactattaaagaggatttctgattagaagatagttggttccacgtcgggaagcttttcgtttccggacgtggaactttttttattgtgtggctctagtactttattctactttgctaaagtgaatacgaagaggagcatcttccatagagctcataaattcataaatcatggctccaaaatcttctccttgcggttcataatcatccaatgtgcattccaatacctctttgctatccactgtgattagtcggaaaccgacaagagccgggcgaatgtctttgtgggtagtagagaatttgacgtttacatcaggtatttccagtatggatacttttacgtttgcgccactattctcttggaacgatttatctccttcttctttaaaagtgattttacggggagatgtcccgaaataattcttcaggtctccggatagatcgggagtgaatgtatattctaagtaagagtcaccttcaaatgttattcggtctgaaggtgtccctttgggtgctttgctgatatcttctccatacatctcgaacaaatcaagatttgttattttatcaaatgcccaagttccggtaaatatatccggtccgcttatagtgacagtaagtgtgccgttgctgcctatggcatatccgtctttattggccagacggaggataagtttatcttttccttcttctttcttcaggtacttgatagagaaactccctttatttttgttgataggaacaacaacttgggctccatttacgaattcataatgtaccccttctattgcggtagaactttcatctacttcaatatcgaaggttgtcgctacttttaccttatatactcctcctttcatattagtcagtttgatagagaagtcagcgctgaatccaacttttcctgtactgttctcaaaggacattatgattccattattatttaataagtttacagaagcataattcatcaatcccaacgagaaaccttccggagctttttgtagattaacatataattctttattttcatcaccgatattttcttcaatacgggttaatgtaaaagtagcttctgtctcacctgcttttaataagatggatggttctgatacggtgaaatctacgccttccacagctgttccaccaaatagaacgggaataaagacatccgttagaggagcttggtcagcttttattttcaattctatacttccttttgccaatgtatagaatggctggtcgatatagatttgaggtaggcgctggttatcatcagatgaacaggaagcaagaataaatgtcatgctcatcaatatacatagataatgccctaatttcttcataacatttcttggattttatgtggttattgctgttgatttatactgctttcatattctgcttttatcgcattatattccgctacttcttcagtagtcaacacagtaggattgggtaatttataagttttatttatgaaattagtatctgattgcggtggcaattcatctatatcttcgcaagctgcgtaaattgctccggataatgcgagggagatcataaatatcccgctatatattttctttttcatatttaaatcctccattttatttattttgtatctctttatatccaggattttgtatcaatccgttctctaaatccaaatcgtgcaaaggaattggaaaggtatacatatatttctctgttacatacttcaggccattgagtgctgtccaatattccggtgagccattccgtttttgttcaaagaaacggtctccttccagaaataactcttttctgcgttcttgcagaatgaatcccattagtggggttagagcattaccctctacatccgtttttatgacttctttatctgaaagagttggtagtttgtcaactgtcaggtcggtataattactgatacgatgtgctcgtaattcgttaatagatttcaaggctttgtcttcttgcttcatgtgataataacattccgcttctatcagtttgaattcggctgctctcataccacaaaagaaaatcttttttgcttgccgttgggtgtttacccaaagtgcatagcggatatcgcttgttttttcttcttcagagaaagtacttaaaaaacgcagactaacgggacggtattgaagggtggtatttactccggatagatcgtcactaccggtggctgtgacagcaagatatgattttaaaagctggttgcccgtcaattcgtatgcattagtcatcatagctttgtatgcctcaccttccaataagggatatttgttcaataagtcttgggctatcggaagtgctttgctccattgccgtgtccagaaatacatacgagcctgatatccttttatgacatcttccgtgaaacggtagatattatcattgatatgatagctggcagccttttgcaaatcagactctatctgattgatagtggcctgcatggtactgcggagtggcttttcttccatgtcaaatgttgttacaagcggtaggccaagctgagtgtcgaattctccagtgcggggtacttcgcagaatattcgtaataattgataatatgccacacctcgtatagcatatgctgtacctcgaatattattagcttcttccgtatcgctttcttccatttcgttcaatacaatattacagtcacggataaattcataaagagattggtagtaattgggatattgattttgacgaataatatcgcctacgtatgttgccaaagaacgtgcgcctgagcttgtcagacaggtttcaaaatcgtcaccacatactgcatcccacgtcatccattggttggcgtttccaactaaataactgtctgacccagcatcaatactgttaagtcgtgtatgaataagtgcagaaaattcttctgctgttttaggaatagtacgtccataaggctttatatctaaataattgttacacgatatgcatgataatgcaattagtccgatacttattatattcttttttttcataatgttttgtttttaaaatccgatagaaactcccatagaaaaagtacgtggagtaggataaactgctcctggggtttcggggtcaataccggaataattggttattatgaataaattgctgacactgaatgatagtgccaatgaactgatatgtgcccttttgagccattcattttcaaagttataacccaatagtaatgatccgagtttgaagtaagatactttttccaacatagaggcacgagtgatctggctgctggttatcatataattatccaatcccaaatattctccatacgcatcaatgatacgtgggtatccattggttatcgggttatcttttgtccaacgattcacacggtcttttgttacgttcaggaagttggtatacaggtcattttcttgcgtaggaatgctttcgactgctgcagatgattcatttagcatggtgtaagataccggacaagtgatattgttcagtatttttcctcctaaagaataagaacctcctaaactcaggtttattttcttgtatgataaagagatggaatatcctccgttggtaggtgcgttactagttcccaaatagaaagcatagtttttagcttcaccacgatctgcttccgtagacattgtaacgtccggacgggtagcataagcataaattcctaatttctcatcaatgcctattacttttccactgacaatagaacttaatgggtagcctacgtagttagaattgaaaatgcttccattaggtgaggaatattttagcaacttattacggttgtaagcaatattggcagttaatgaaagattccagtctttagttttcaatacattggcacttattgttacttccgctccttgattcagtaattctgaggtattataactttgatatgagaatcctgtggtgtaaacaaccggaacactggttacggcatctcgtgtgcgtctgtcataaagttcaccttgtaagcgtagacggtcattcagaaaacctatatccattgagattttcatatcgcgtgttttttcccagcgtaatttggcgttcggggcattccgtaatgttcccatgcggtaataatcattgtcggctttgcggaatgagttttcataatccattaccaattgtggataaacagacttattaatgtttcctgtatatccgaatgcagctcgtaaagataaagtgctgataataggttttaaaggtttcatgaactcttcctgatcaacattccaagatagaccgacagagccggtagggttgaattgttcattgctaccgaaattattcgagccatcagtacgtcctgtcaaactgagaatataacgttgcttgaatacatagtctaatgaaaggtaaaaagaagcgaaggcgtcttctacaatactttgaccggatagctgatcgacgatggctgcatacgaaatcaggttgttatagcctatatccatactttccggatatatggggatagaagaattaccggatatgggatcatatccatatcgtttttcgtagatgcttttggaatattgtcctcgtatctccgagcctaacaatgcgcttatataatggtcgcgaccgaaggtgttgaaataatggagctggccgcgtaaattgtaattggtgttataagcattggtctgagtaatggaaccgtatgtacgtttagatatactacttgcactaccttcaaatgggcggtcctgccaagcggcgtatgtgtttttgccattgatattatcggaggcatttgtcacatatccgtaagaagccaatccttcgaaacttaaattgtctaagatgttaacgcttagattagcgattaatgatgcggacatatttttggtttcgttggatgtttcattgatttctcggaaaatattgtatccaccatccggtaataatttgtcataagcaccattggcatgagttatactgtaatatgtattgtctgctgcatatgatccgtcttcgttgtatattctttcgtatggattggcaaaataggcatacttgaaagggtcaacattcagtgatggtgaagtggattcctgtatagccatatcagcagagatgccaagtttcacccgtttgttgggcttcatatcaagtttggcacttacattgtagcgttcgtaatcggttttttttactagtccattgtttttcgcatatcctaaagaaacgtaataagagtttttttccgatcctccggagagagaaagataatggctgtttgaaactgaattttgaaataattcgtcaaaccaatcagttgtttgttcgccaagacgggctatttccgcattttgctgttctaaggtcatattggcgtatttcccgtatccggatcgaatcatgccgaccgcgccaataaccggatagtgagtaccatcggcaaaacctttggcagagaattcattccacagctcttgctcccaggccagtttctcactggagttcattagattagcatttcccggaggtcttgtgacgatggaaacattggctgaataattaatactcattttcccttcttttcctcgtttggttgttaccacgataacgcctcctgctgcacgagagccataaatggctgttgctgaagcatccttcaatactgtgatagattcaatgtcgtttgggttaattccggagataccatttgcaaagatttcattgaaatcacctgcacggatttggctgcttgatatgcttggaatatctttctgcaaaggtaccccgtctaccacccacaatggttctgcattacctgtaattgtgtttgtaccacgaatacgtattttggccgattctcccgggcgaccggaaacagctttcacgtccattccggcaacttttccttgcatcaacatatccaaattggctgtaggggctcctttcaggtctttggctgtcagtgttgtcaatgaaccggtagtacggcgtttggtcgtacgctggtatccggtgactactacctgatccagttcggaggtttcatcttctaatgtgatatagccggacagtggcttggttacccgcatgaatagcggtttcatacccacgtacttaaattcaatctgggtgttccgatctacccacagagaaacttctccttggtcgttagccactactccctgtgccttaccggtaacttttactgttgcaccgggcaagggattcttgtctacgtctacaatggttactttcactagaatggtcgcatcgccttgcggcttttgagcgaacaggattgtagccatgcaacagagacagacaaacacgaatgctttgaatgttttctgatacttcataagctttttgagttagggttaattatgattgatgatatcaatatgttgctttaccggttgaatgagattctccacaaaatagtagcggatcaaattctgataatagggacacattactccatgatcttttcccggcaggataaacatatcgaaacgtttgttggcttttatcagagcgtctgccagacgataggtagatgaaggcgggacattcttatctacatcaccggtgataagcatcagatggccttttaagttctttgccagttccatattggtcggaatcttggtggaaaataccgtttttccagtctttggatcagtcttctcggtcagtccgtgaaatgcttctccccaccattggatatagatattgttgtcatggttgcccgaagcagctaccgctactttataaaagtcgggataagtgaggatggcggctactgtctggaatgctcctccggagtgtccataaatacccacacggttaagatcgatgaacgggtagttctttgctaactgctcaattacgcttttatcatcagccaacggataatcacgcagattaccgtagccgaagttatagaaatcgtgtccacgcaaaggagaacttccacgtggagccacattgatgactataaagccaagctcagccagtgactggttaccattatcgtcaagtgtgaatgattgcggaatctggtcgtcttggggaccgggatacacattgctgataataggatattttttgtttttatccagttgagacggtagatacatgagtccgtaaagatctgttttcccatcggccgctttcaactttaacagtaaaggcggttgccatcctgcttttcgcaacaggctgtcgtccatgcgatttacctcaaaatattgtgtgggacggtcgatagacaatacattcattacaggcgccaagtccatacgtgaatatgtatcgatggcatatcgttggtcgtcggacagggttaattcgtggttaccgtttcccggagtaagcagcgtttgtttttttccatcaaaatcagccttataataaaaggtataataagggttagtatcaggttcgttaccatatccggcaaaaatgatatttcttcgtaaggtatctatgtgtacgatactgcctgctacaaggttatcaccatgtgtgatgcggtttagtaatcgtccgtcattattgtacagataatagttaccttttcctgtgcgttccgaccaccaaatgaaatattttcctttctctataatgcgatagcccgatagggtcaagttgatgtgtggagcacattcttccgagataagctcagtgactgtgccatctgtcacgttgatacggcaaaggtctattttatcacccttacggcttctgcgcgtgaaaaaaagagctttgggagaacggaaatagtctaaagttactacttggtcaggatatttcccaatcggtaacatctttccttgttcatggtcggcatcataccaaaacatacggtattgacgcactccggcatcaccgggcataggcatcttgaaggtatttgtcgtcggacgttgccgtgcaagggagttgataaggctgatttcttttacttcactcatatcctgtatcaggcagacataacgatgtcccagccagaatcctttggtgttagactctattgtgtctttagagcaacggtaagtataggacgcatcctctttaccgtcttttgtcagacggtgtatgattcctgtacggttgttacgtatatagaggtcatatccgcatcccaacatagtgaagagtgagtcagagctatggtacgatggtttgagaacaggacgttccttctttttgttttctgcctttatctgtgtcagtattccggtgcgcatatcatacaccatagactttcctttcttatcaagataaaagcggttgaagtcattcttcttaaatcgatacccgtaaagctgtatattccttgcatcgagtgtgtcacccgtgattcttgcatattgttgcacgaattgcaggttatcctttatcatattgcgttttttaccattcttggcattaaccagatagtaagaaactccattatcttcttttacattgtagtaaaaataagaactaccttcaatccagttgggataaggtcttttgccttttatatattgctccagtgcatcagaggaaaatttttcagcacgtgcccaatccacatcgtttacagtactgtttaccgatgtggatgttccttgtgcttgtatgcataagcagaacagcaggcctataaaacttatgacagtattttttctcatctctttttatattcggttgctaatttgactgcttgtagtgcgtcaatgattcctccgcttgtacaacgatcttttaaattgtcagccggacgaacgctctttattaatatctctttgatttgtgtggccgtcagctttgggaaatgggcacgtaacattgctgctacaccacttactatgggggtggctatactggttccttgtgataccatgtatttgttgccgaccgttaccgaggtaatttcttctccaggggcgaatacatctacttcttttgctccatagttggaaaactgacttagttgcccttttttgtcagaagaaccgactctcaagtaattagggaatatttttccttgcgcatcctttgctgaaggaaaataggtgatgagatcgatattccgtttgtcattgcctgccgcttggatgataagtacgtcttttttgagagcatattcaatagcctcatttaccatgtcggcatcgggtgaggtgtattttcctaaactcatgtttataaccttagcgccattatccactgcataacggatagcggttgaaatgtctttgtcgtattcgtcaccgtcaggaacggcacgtatgatcatcaaccgcgcttgaggccagacaccggtgatggcagcattattgattccttgtccggcaatcactcctgcaacgaaagtaccatggtcgcatccttttgcttgtaataacgaatttccgtaaaaacgatctgaaggattttttaaatcgtcgcccattaataaccttttgtcagcatcatgctcgataccatataatcttttctgcatcaaggcaaatgtgttgcggtgttgcttatgaacatttttccataatgatttttttccactcttgaacatatcgacaaaaagtgtttgacaggcgttgccccatgccggatcttcaataggaagatgagttaatccattgactgtaagtgtgtctatatttattccgggaatagtagtcagcacagaatctatcagctgatatgcttggtcttttgcggccgtataacccacatattttatataactcatgatacccgccttctttttcatcttttcgtagtaggcatattcagtagtatcttgtatatctgccggatcgatatttttatatttgggatataaccgtttgaattcgcggtactcttcagttccggcactggtcatgttgaatgtcccgtctttagttccgagaaagttccatccgtgcaaatcgtccgcgtatccgtttttatcattgtcttttccatcgattttttcttttggattacaccaaagtgcgggtgctagatcgatagaggtcgtatctatacccgaatcgatgatacccacgatgatttgccggtggggttttagctttttttcttgtagaaagtgtaaggctttttccatatttatgccctgcaatgtatcattatacactttgtaccagtttgaatacgctgttgtttgtcctttgagattgtttacggatatccctagaaggatgagcaaaaagattggtagtttgaattttcccatgctttcatgtttttatatttgccatatctgtggcaaataggatgatggcacaaaaatacaatataataattaaaagacaataaatccagtctgtaatttaataaaaagaataaatattcggaaatagctgtgaaatcctgtatttatagacttgtatattaggaatgtgatataagataggtatagaagactaaaaacgcgtaaaaagaacaaggtaatcgttctttttacgcgtttttataatattctacttacactttgtaagttgtggaatgttcctgttaatctttcttatgcggataatcaatcgtgtaatgcaagcctcgactctctttacgttccatagcctgttttgtgatgagataacccacattgatcatgttgcgcaattcgcacagctcgcgggtagccttgctactcttgaacaaccgttcggcttcttcatagaggatgtccagccggttccatgcacgtatcaaccgggtattactgcggacaatgccaacgtatgcttccatgatctggttgacttccttcatactttgggtaatcagtacacgttcttcattggagatggttccttcgtcgttccattcggggatatcttcgttaaagtcataacgttccaatacactgagcgcatgtttggcagcagcgtcggcatagacaatcgcttctatcagcgagttggaagccagacggttgcctccgtgcagacctgtgcaggagcattctcctaatgcatataggcgacggatactggattgtccgtccagatcgaccgtgataccgccacagagatagtgtgctgcgggtgccacggggatgtaatctttggtaatatcaatgccgagactgaggcatttcttatagatattggggaagtgcttttttgtctcttccgggtctttgtgtgtcacgtcgaggaatacatggtcttccccacgttgtttcatttcattgtcaatggcgcgggccacgatatcacgtggagccagtgaaagccgtgagtcatatttttgcatgaactctttgccgtcttgtgtacgcagtacggcaccatatccacgcatcgcttccgtgataagaaaagcggggcggtctcccggattgaagagggctgtaggatggaattggataaactccatgtctttcactgcacctttggcacgataaaccatagcaatcccgtctcccgtagctaccaaaggattggtcgtattacggtaaacagcttcacaaccacctgttgccatcacggttactttggaaaggaaagtatccacttcgcctgttgcttcattcagcacgtatgcgccgtagcatttgatacccggtgtataacgggtgacgataattcccaaatgatgttgcgtgatgatctctacggcaaagaagttctcgaatactgtgatattagggtgcttttttactgtttctatcagactctcctgaatctcggcgcctgtattatctttgtgatgaaggatacggaattccgagtgtccgccttctttatgtaaatcaaactctccgtcttctttcttatcgaaatttactccccaatgaataagttcgttgatctgttcgggagcattgcggactactttctccacagcatttcggtcgctgatccaatctccggcaatcattgtgtcttcaatgtgcttctcgaaattatctactgcaagattggttacggaagctataccgccttgtgcaaaaaaagtgttggcctcttccaatccggctttacagataagcgcaactttacctttgtgcgctactttcagtgcaaaactcataccggcaattccggagccgatgacgaggaaatcgaattttcttaccatagttttgttatttctcaccgcaaagctacaaaataagttacttcgttgtacttttcgttgtcactaattcataaaattgctaccttgcgggcaaaaatctgacaaaatgaatcgaattttccatgcacgtattgcttggtaccaatatttcttattggtagtacttactgtgaacgttgtcggtgcattgtggtgtaagtatatcttgccggcagtgttgctgatacttatgctgattgttgtgatcgagcagattatccatactgtttatacagttactcctgacgggattctggagatatctaccgggcgttttatccgtaaaaaagtaattccgatctctgagattactgccataaggaaatgccactctatgaagttcggacgtttttcggtgacggagtatgtgttgatagaatgtggaaagggtaagttcgtctctgtgatgcctgtcaaggaacgggaatttgtcgaattgcttgaaaaaagattaactgattatatactatgaagtatcaactaattattattggtggcggtcctgccggatatacagctgccgaagctgccggtaaggccggtttgagcgtattgcttatcgagaaaaataatctgggtggtgtttgtctgaatgaaggatgtattccgaccaagacattattgtattcggcaaagacgtatgatggtgcccgccatgcgtcaaagtatgcggtgaatgtctccgaagtatcttttgacttggcaaaaatcattgcccgtaaaagtaaagtagtgcgtaaactggtattgggagtaaaatccaaactgacttccaacaatgttacgatagtggcgggagaagcacagatcattgataaaaatacggttcgttgtggtgaagaaacctatgaaggggataatctgatactttgtacaggatctgaaacctttatccctcctattccgggagtcgattccgtagattattggacgcatagggaagcattggacaataaggagctgcccgcttcacttgtcatcgttggcggtggagtgatcggaatggaatttgcctcgttcttcaacagtcttggagtacaggtgacggttatagagatgatggatgagattttgggcggtatggataaagaactctccgctttgttgcgtgctgactatatgaaacggggaattaaatttttgcttagtacgaaggtcgttgctttgtcacagacagaggaaggcgtcgttgtctcatacgagaatgcggaggggagcggaacagttgttgcggagaaattactgatgagcgtcggccgtcgtcctgtgacgaaaggtttcggacttgaaaacctgactctggaaaagacagagcgtggtgccgtcaaagtaaatgagagaatgcagacatccctttctaatgtctacgtttgcggtgatttgaccggattctctttgctggcgcatacggctgtccgtgaagcggaagttgccgtacattctattttgggaaaagaggatactatgagctaccgcgctgttccgggagttgtctataccaatccggagattgccggagtgggcgaaacggaagaatcggcttctgcaaaaggcattcagtataaagtagtaaaacttcctatggcctattccggtcgttttgtagcagaaaatgaaggcgtgaacggagtttgcaaagtattgttggatgaacaacagcgggtgattggcgctcacgtattgggaaatcccgcttcggagattatcactcttgcggggactgccattgaactcggactgacggcagcgcaatggaaaaagattgttttcccacatcccacggtaggagaaattttccgggaaacgttgtagtacgaattaataagattggggtgcgtgactggacaggtaaagaatatgtggtaaatgtaagatagtataaacagtgtagtatgaagaatattattttatcagttcttttttctttctgttttcttcccctatggggacaaaaggacttctcccaaatagattcgcttatcaagcaactgcttcctgaatcatccgaagtcggcatatccgtttacgacttgacggctaagaaaccgctttatgactatcgtgcggagaagctgtcccgtcccgcctctactatgaaactgctgactgccattaccgccctctcccgtcccgaagccgatgagcctttccgtacggaagtgtggcacgatggagtgatagaacatgatacattgcaaggaaacctgtatgtggtgggtggattcgatccggagtttgacagccaggcaatggattcgttggttaagaaaataatcagttacccgttttctgtgattaacgggcaagtgtatggggatatttcgatgaaagattccctttactgggggcatggatgggcatgggatgatactccggcaggttatcagccctatctctctccgttgatgttctgcaagggaacggtgcggatatcggtagttccctctaccgtgcagggggatacggcaagcgtctcctgccagcccgtatcttcttattatactttgacaaaccggacgagaacacgcgcttcctccgccggaaagttctcttttactagggattggctgacgaacgggaataatctgactgtttcgggcaatgtcacttcgatcagaaaagatgatatcaatatttatgacactccccgtttcttcatgcacacctttcttgaacgtcttcggggagaaggaattgccgttcctccgtcgtatgatttcgccgagttgccccgtgacagtgtgaaagtggagcagatggcgtgctggaatacttccgtgcagaaagtgttgaaccagttgatgaaagagagtgataacctgaatgcggaagccttgctttgccgtctgggcgcgcaggctacgggaaagaaacaggtggcggccgaagatgggattgtcgagattatgaagctcatccgtcggctggggcacgacccgaaagactataagattgcggatggctgtggactgtccaattataattacctctctcccgccctattggtcgatttcttgaaatatgcctattcgcggacggatatttttcagaagttatacaaggctcttcccgttggcggggtagacggtacgttaaaaaacagaatgaagagtgcgcctgtatttcggaacgttcatgccaagacaggatcgtttacagcgataaatacgcttgcgggttatctgcgtatgaagaacgggcacgaggtggcattcgccatcatgaaccagaatgtactttcggctgctaaggcaagagcttttcaggataaagtctgcgctttcctctctttataaggtctatggtgatgtcatccctccgttaatacattaatccgaacaaccaaaatggaatctcgttattgaatccaatttctatgttgtcaagagccagatatccgttctccactcctgctaattgtttttgaattttgtttttaccgccaatctcgaaattgtatgtctcattcagtgtgaaatctatttgagaggaataggtaactttatgttttacggctgtttgattgaagaagaatgtttcgcggacatttcctatgtctgttttttctcctcccagtgcgtatgcatagtttgtattacctaaataaatcttttccggttttgtcagttgtttgatgccggaagcttctttgtcgagcagcaagagggcttgggccttttggagataggatagataattcaacagactgatgcgactgacttctatttctttgctgagcattgatatattgggaatatatggcacaagtcctgcgaggatggaaaatagcttttttattttaccaatggaataataatctattttttcagtagaaggtaagtctacatctagaattgtattcaagatggctaataacctctcgtggtacaatattttatcttctttataaaaagggaaataaccgtaagttaagtattcgttgaatgctacaagcggtttcaactgtttgcttacgttcatggccagttctatatgcttggtcaatatatcggaaagcgggagcacttccattttatatccatattcaaattgcaggaactcacggaaagaaagtccgtgcaaatgataggtaacggctcttcttgaaagatcggcttcacctttatgtatttcgagcaaagaagagccggttatgcacttcgtccaaaaacaaagctttccctcccattttctgaaactcatccgccaactcaaatagagagtgggtagtaaaccaaatattgtccaatgaaacataaagtgtatcattgtcataaccagggtaatgctcttttatatattgaagcatgagggttgtcttccccgttccacgagcgcctgttatggctattaaccggttgtttcaacgaatctcatgatacagatatcttacgaagtctaaggagacccgttctcttagttgatagaatgtggcaaatagttgtttcataagagtggtttattaattcctctataaaaatacaattgtattctctaataaacaaaaataaccggattttgtttaccagagaatacaattgtatctatttgacctggaatactgtaaattctatattctatttattttgcgtattcagcccagttcgtattcttcatatcaccgctcttagccagttccgcgtgcattccgagtgcagcttggatggcgtgtggagtctgggctttgccgccggccagtttgagataatcccaaagcaactgtttgtagtcgggatgcgcacaattctcgatgatagcctgcgcacgttctttcggactcttgccacgaaggtcggcaacaccctgttcggtgatgatgatatttacagaatgctcgctgtggtcgaggtgagacaccatcggaacgatagcgctgatcttaccttccttagccacagacggacaagtgaagatagagatataagcgttgcgggtgaagtcgcccgagccgccgataccgttcatcatcttcgtgccaccgatgtgggtagagttcacgttaccgtaaatatccgcctcgatagccgtattgatggaaattacaccgagacggcgaaccacttcggggctgtttgatatttccgacggacggagcaccagcttgtcgcggaagaaatccatatcgttgtaaataccttcaaggcagtcgttggtgacagtcagtgagcaggcactgccgaacttgatacgtccttcgcggatcagacctatcacggagttctgaatcacttcagtgtacatttcgaaagggggaattgttttgtcgcgtcccaatgcaccgagtacggcgttagcgatgtttcccacgcccgactgcaacggaaggaatgtagccggaatgataccgcgtttcatatccgcggcaaggaagtcggccacgttctgcccgattttgtcggtcagcggatcggcagcggcgaaagaacgggcttcgtccggccaattggtttccaccacaccgacaatttttttcggatctacctgcacgtacggcagtccgatgcggtcactcggcttgtagatcggaatctcgcgacgataaggaggatccagaggttcgtatacgtcgtgcagtcccatgccggatttactgtgcgcactgttcagctcgataataatctggtctgccaggcggcagatggttggggcgataccgccggcggcagtcaggtagatttttccgtccggagtcacctcgcaagcttcgatgatggcaacgttcactttgcccatgaatccgtagcgcacctcctgcgccatctgtgaaagatgtatgtcgttgtaggcaatttctccgttgttcacagctttgcggaaatcggcgttggtagtgtaaggagcgcggtaacggatggctttggcacgtgatagtatgccgtcacaagattctccggtagatgcacctgtaaaaattcctacttgaaacgggtttcctttcgcgtgttccgcttcagcgatttttgcgagttcggctgtgacagccttggctgttccggcgggagtaaatccgctaaggccgatgttgtagccatgtttgatcaggcttgcagcttccgctgccgagatacgatttagtggcataaatagtacaatttcgtgttaaaatacagttgatattttagggttaattatcgcttaatattttcgttgaagaatctctccccagataatggcgcgtcgggcttcttccgccgagcggattgtgaaatcctgttcgttgccgggcgacgactcgtcgggagcgttgtattgggagttttgccggatattgcgtttgtcctgtgcggcgctgttcgctatggaggcggctacggatacttcttcccgtttctttttccgtttggggttactccacgcttcgggcataggaactgcgtccggttttatttcgtcggacgatggcataggggaaacggggcgtttgccgggctttttattcttattcacctctttaaatattcccacaagaatgacgcctgctatcaagagaaattttaagaaatcttccattgtgcttcactgctatttagttatctgccaaagttacgtattaaatctgattcaggataacttttcagtatgaaaaaagggcagcttcacagctccccttaatttttttaacctaaaccttaactatgaaaaaatctaatgtttctttcattgcacaaatgtgaaaaataaaattaaaattgccaagaatactgccggaaaatgtttattcccttaacattaattacaggttatgtgacttaatcgcaagttttggtgttattttcgcgctaatttgtatcttattaaaagcgaagccgtatctttgcagccgaatttttaatttagatttgagtatgaacgaattaacgggagcggactttaaatccgcaactgctgatgacagcaaaaagctgtttatcgagacttacggctgccagatgaatgtggccgacagcgaggtgattgcctcagtgatgcaaatggcgggttactctgtggcggaaacgcttgaggaggccgatgccgtgtttatgaacacttgttctatccgtgacaatgcggagcagaaaatcctgaaccgtctggagttcttccattcgttgaagaaaaagaaaaaacacttgattgtgggcgtactgggatgtatggccgagcgggtgaaggacgatctgataacgaatcatcacgtagacctcgtggtggggccggatgcatacctgacattgcccgatctgattgccgctgtagaagccggagagaaggcgatcaatgtggaactttccactaccgaaacttatcgggatgtgattccgtcgcgtatctgcggcaaccatatttccggattcgtgtccatcatgcgcggttgcaacaacttctgtacctactgtatcgtgccctatactcgcgggcgcgagcgtagccgtgatgtagagagtatcctgaacgaagtggctgacctggtggcgaaaggttataaggaggtgacattgctgggacagaacgtcaactcctaccgttttgagaaaccgacgggcgagacagtcactttcccgatgttgctgcgtactgtggcggaggcggctccgggtgtacgtatccgtttcacgacctcccatccgaaggatatgagcgatgaaacgcttgaagtgatcgcgcaggttcccaatgtgtgcaagcatatccacttgcccgtgcagagcggtagttcccgcattctgaagctgatgaaccgcaagtatacccgcgaatggtatctggaccgggtggcggctatcaaacgtatcatccccgactgcggactgacaacggatatcttctccggttttcattccgagacggaggaagatcacgccatgtcgctctctttgatggaagagtgcggatacgatgcggctttcatgttcaaatattccgaacgtccgggaacgtatgcctcgaaacatcttgaagacaatgtgcccgaagaggtgaaagtgcgtcgcctcaacgagattatcgccttgcagaaccgtctgtccgccgagtccaaccagcgttgtatcggaaagacgtacgaagtcctcgtggaaggagtctccaagcgctcgcgtgaccagctgttcggccgtacggaacagaaccgtgtcgtagtgttcgatcggggcacacatcgtgtcggcgacttcgtgaacgtacgtatcacggaagctagttcggctacgctgaaaggcgaagaaatctgatttttcactacagaggacacagaggacacggaggtttaaaaaaaaggaaaaaacctctgtgccctctgtggtgaaaactgtggtgaaacttacatcatcatgtttttcctgatcgagaattttacgatagccatcgtgtgaatgcatttcagaggcaggtccatggggtcgtgatgcgggttgtagctgacgagtcggatacaaccctctttctctgatttgctgacgtacttcacggtcagatattggtctccatccaaatcgaaagagacgatatacatctctccgtatatcacttctgttgtggatgtggcgaaagtggcagcaggattgtgtgataccgtggggcttggcggttcgggatatagtgtgacgggtctctctttggtgtctccgacattgttggcaattaattattatgatgattattcctttcttgatacatcactcttttctgcccacaaggttttcctgttaggcgactcttgtgtttcagggttttcacctatttcctcctgtattccccgtggtttgcccacaggagcggtgtatatgtgtttgtatggggatagtgctgtgtctattaattgttctgtgagctattatgattccttggagcgtattgtacagactaaatcgctcaatcatcggggaggttatgatatgtcgtatctttcttgcaatctttcgggtgaactgttagcggattgatctatgaaaacggtgtcgctgcatggttgctgaccgagtccggttatatcactttggctgatgataagtaccattactatctgaaagatcatcagggcaataatcgtgtagttgttgatgaaaccggcaatgtagaagaggtgaatgattattatcctttcggtggcctgatgtcttcttcttcgaattcagttcaaccttataagtataatggtaaggagcttgatagaaaaggtggtttggattggtatgattatggtgcgagacattatgatgcggcggtaggtagatggcatgcggtggatccgtcaagtgagaagtattatggctggagtccgtatacatattgcaagaatagtcctgtgttgaggattgatttggatggaaaggatgattatgtagtgaccaaatcaggaagattattcaatgaaaccccaaagaatatgaggaatagaagttctacggataaccttgcttcctttggcgaccgttcgaagtcgattaaagtaaaagcgggacttcttgggaatatgtataattcacaaaaaggaaatgcgtacataaaagcttatggaagtacacaagatttggaaacagctgctgcagtatttaaatttgctgctgacaatacctcggtagagtggaaattagatgtatatgatgataacagtattaaaacagcagtagtaacagataagagtgaatattctgtgaatgggacctatgctcaaaagcaacttcagatagaaggtgagagaataatagatattcattcccatttatcgggaggtaccaaaggaggagccgggaatgattttaatctggccaaacctaaacgtaaaaatgctgtttacattagagatagtggaaaggagggaatgctatatgagtataataacaaaaagtcgcagataaaatctatacctatattttcaaaagaagacctattacaatatatacgaaaatagtaaacatatgagaaaacttatcagaattattatggtagtgatattttggggatgtatgtccccctcttctactcttcctgagatacatcaacgtgttgccgatcaagtaaagatcttgatagacaagggacatttgtctgccccttacatagagatttacgaatcattctctaatgattctaatgttttctattatattagcaattcggattccccaggttcagagaatgcggagttgccttcaagagttcttgagtataaaggtcgatatttctgttttattgagttggatgaaccggaaatgacacgaacagaattgtttgaaaagggaatcgtttctgattctaattttcaggaaaatgaatatttgggtgatagctcaatatattggatgcttgctcttcggcaacatgaaaatgtacaaactttaataaagcagaaaccgcaatattactatcctacagaatatccggagctttgaccctatttttcgggtgattccccgcaaggaaaatttgcattgatgacattgtttcagcatgatgttattattcccgattcattaacattcttgcttcgtgaacgggagctaaaagtgagcaggcaggatattgaaagattcagtggaaagattaatataaggaatctaacggactccactttgatcttgtccgaaagtccgacgatgggaaacatgtcttatgcagtagtaaatggaattgatacattgatcctcattttaagagattcgctgccggtaagaattagtcctcacgattttcgatgtttataattatgatagcgaatctccatatgattttcttcggagattctcggataaagaggcttggatgaatatgtatcagctatttgcagattcaaccttttgttttttgaatataaatggaaaaccgacaggatttagaatacaacatgatgatagatattcaggtattattttgaagtcagattcattatctagaacgatcaataacgaaagtttttatgataaagaagataggatacgtagattctttaaatgggatcagtaattaataacgtgtcttaccttgatatagttgacttaaatttgtctaatccatatcagggtaattttttctattagcatgattagatactcactggtatacttctttctcccaacaggctgctttatcattttatctctcaagatttagtaaaatcatgcagggtttatatttctgatttctattaaaagtccttaacgaaagcccaatccatcacattttatttgtttctttgcaccaaattagggtatagtgttgcttcttgcattgaggcagcacttaattttgttttaggattaatggagaaactcagtataaatgcttgtccggtgtgtggttgtacgcacttgaaacgcgtcatgacttgtacggatttttatgcttcgggcgaacagtttgagctgtattcgtgtgacggttgcagctttacgttcacgcaaggagttccggtggaagcagagataggcaagtattatgagactcccgattacatctcccacactgatacgcgcaagggcgcgatgaataatatctatcattacgtacgttcctatatgctgggcagtaaagcgcgtctggtagccagagaagcgcatcgcaagacgggacgtttgctcgatataggtacgggaaccggttacttttccgatacgatggtacgtcgtggttggaaagtggaggcgatagagaaaagtccgcaggcacgtgaatttgcaaaagcgcatttcaatctggacgtaaagccggagtcggcactgaaagagtttgctcccgatagctttgatgtcattaccctttggcacgtgatggagcatctggaacacctcaatgaggtgtggggacgactccgtgagctgctgacggaaaaaggagtattgattgtggcagtgcccaactgttcttcgtacgatgccaagcgttatggcgaatattgggcggcatacgacgttccccgccacctttggcattttactccaggcactatacagcagttggcttcccgtcacggttttattatggcagcacgccatccgatgccgttcgatgcgttttacgtatctatgctgagcgagaaacattgtggcagttcgtgcagtttcctgaaagggatgtatgcaggcacgctggcttggttcaacgctttgggacgaaaggaacggagcagttctatgatttacgtattccgaaaaaagagataacgcatgggaaataaaaacaagtataagtcaggttcgattttcgacatgcagttcattacatcgagtatcagtacgacactggtgttgctgttgctgggactggtcgtctttttcgtgttgacggcacacaatctttccgtctatgttcgtgagaatatcagtttctctattcttatcagtgacgatatgaaggaagccgacatactgaaacttcagaagaaactgaacggtgaatctttcgtgaaagagtccgaatatatctctaagaagcaggctttgaaagagcagacggaggcgatgggcactgaccccaaagagtttctgggttataatcctttcaccgcttctatcgaaatcaagctccattccgagtatgcgaattccgacagtatcgcgaagatagagaagaagatcaagaggaataccaacatacaggatgtgctctatcggaaggagctgattgacgcggtgaatgacaatatacggaatatcagcctggtgctgcttgcgttggcagtagtgcttacctttatctcttttgcattgataaacaatacgataaggctggccatttactccaagcgattcctcattcacaccatgaaactagtaggtgcgagttggggatttattcgtggcccattcctccgaaagaatgtgtggagcggagtgttggcggcggttgtggcagatacggtgttgatgggaactgcttattgggcggtgacatacgagccggagctgctccaggttatcacgcccgaggtgatgttgattgtatgtgcaagcgtattggtgtttggaattgtgattacatggctctgcgcctatgtgtcaatcaataaatatctgagaatgagggcgaacagcctatactatatttagtggataatgagtgataagtaataagttgaggtagtgagacacgtcgtttgcgactttaatttataatttttaatttataatttttaattgaaactatgtctgacaagcagaaatttgcctttgataaagtgaactttatcttgctagcaataggaatggcgattgttatcatcgggttcctgctgatggcgggaccttcgtcgtccgaaacagcctttgaaccggatattttcagtgtacgtagaataaagatagcgcctgctgtttgcctgtttggcttcttgtctatgatatacgctgtgttgcgcaaacctaaaactcaaaagacagagaaataaagatgggggatctgactacatttgaaacaattatcatcgctattgtagagggattgacggagtttcttccggtttcctctacgggacacatgattataacacaaaacatactgggagtagagagtacggaatttgtgaaggcttttacagttattatccagtttggcgcgattctttcggttgtctgcctttattggaaacggttcttccggttgaacaacactccggtgcctgccggtactttctggctgaagcgtttgctgcatcggttcgatttctattggaaactgttggttgcttttatccctgcggctatattgggtttcttattcagtgataagatagatgaattgttggagagtgtgacggtggttgccgttatgctggtgattggcggagtgttcatgttgttttgcgacagaatattcacgaaaggaagtgaagatacggtgctgacggaaaagaaagcattcaatatcggcttgtttcagtgtattgccatgataccgggcgtttcgcgttcgatggctactattgtgggcggtatggcgcagaaactgacacgtaaggaagcagccgagttttcgtttttcctggcagtgccgacgatgtttgcggcaaccggatataaggtgctgaaactctttctggatggagggactgaaatactgatgaataatatgccggcacttatcattggtaatgtagtggcttttatcgtcgctttgcttgctataaagttctttataagcttcgtgaccaaatatggttttaaggccttcggttggtatcggattatcgtgggtggagctattctggtgatgttgttgatgggatataatctgcaaataggctgacgggctttggatgagttgtcgcagaagcgaatgagttataaataaaggctgatgaattttaaaaaaggagaagtactgttttttaataaacctcttgggtggacttcatttaaagtagtgggacatgcccgctatcatatctgtcgccggataggagtgaaaaaactgaaagtcggacacgctggtacgctggatcctcttgcaacgggggtgatgatagtatgtacgggtaaggccacgaagcggatagaagagtttcaatatcatacgaaggagtatatcgccacgctccgactgggggctactacgccgtcgtacgatttggaacacgagatagatgctacctactctaccgaacatatcacacgggagatggtggaagaagtgttgacacattttataggtacgatagaacaggttcctcctgccttctccgcctgcatggtggatggaaaacgtgcttatgagttggcacggaaaggcgaggaagtcgaactaaaggcgaagcagcttgttatcgacgagattgaattgctggaatgctgtctggaaacaccggaaccgatgattcggattcgtgtggtatgcagcaagggaacgtatatccgtgcgttggcacgcgacattggcgaagcactccacagcggagcgcatctgacgggcttgattcgtacacgtgtgggcgatgtccgtctggaagactgtctggaccctgaacactttaaagagtggatagaccggcaggaaatagaaaatgaggaagaaaataattaacgtaataaggaatagatatgaaattatcacaattcaaatttaagttacccgaagacaagatcgcgttgcacccgacgaagtatagggatgaatcgcgtttgatggtattgcatcgtaatactggtaagattgagcacaagatgttcaaggaagttctagagtattttgatgataaggatgtgtttatattcaacgatacaaaggtatttccggctcgtttgtatggtaacaaggagaagactggtgcccgtatcgaagtgttcttgttgcgtgagttgaacgaagaactacgcctgtgggacgtgttggtggatccggcccgtaagatccgtatcggtaataagctgtatttcggaccggacgattcgatggtggctgaggtgattgacaatactacttcgcgtggccgtacgctccgttttctttatgatgggcctcatgacgagttcaagaaagctttatatgaattgggcgagactcccctgccccatacgattatcaaccgtccggtagagccggaagatgcggagcgtttccagtctatctttgcgaagaaggaaggtgcggtgactgccccgactgccagtctgcatttcagccgtgagctgatgaaacgtctggagatcaaaggagtggactttgcttacatcactctgcacgccggtttgggcaacttccgcgatatcgatgtggaagacctgacaaagcataagatggattcggaacagatgtttgtggatgaagcggctgtgaagactgtcaaccgtgcgaaagataacggcaagaatgtgtgtgcggtaggtacgacagtgatacgtgcgattgaaagtgcggtcagcacggacggacatctgaaggaatttgagggctggactaataagtttatcttccccccgtatgaattcaccgtagccaattcaatgatttccaacttccatatgccgctttctaccttgctgatgattgtagctgcctttggcggttatgaacaggtgatggatgcttatcatgtagcgctgaaagaaggttaccgcttcggtacgtatggagatgcaatgctgattctggataaataatggcgaaagtgtatgtaggactcggcactaacttgggagataaagaacagaatcttaaggttgccgtgcaaaaaatagaagagcagatagggaaagtcgtttccctgtctgctttttacataactgccccttggggctttacctctgagaatagtttcctgaatgcggcggcttgtgtggaaacggaactgtctcctttggatgtgttgcagaaaacgcagtcgattgaacgtgaattggggcgcacgaagaagtcggtcaatggcgcttatagcgaccgcctgattgatattgacctgttgctttatgaggatctgattctctctgcagtcactccgtccggagcggaattgaatctcccccacccgctgatggcggaacgtgacttcgtgatgaaaccgttggcggaaatagctccggaactggtacatccggtattggggaagacgatgcgggaacttatttcttctttttctccgcaataaataccggcaaataggcaatgcagcctatcaatattgcatacagcagatgaatctcctggaacggtctgtcaatgaaatggcagacaatggcatagatggcaatcgtgaagcctatataaagcgccaggactaagagcgtttttaatttcttatttagaatcattttaaatctatttatgtgttaaatacggaccaaagatacttattatctccgaaatctctttatctttgcacccgaaatgaaggtgtggacagatttgagtagcttgcaaccacggaaaaaaatgctaaaacacgtcttaccgacgctttgcggtttaatccttgcagcactcacctctcctgctctctctcattttttaattttcaatttttaattcttaatttaaaaagatgggatacttatttacatccgaatcggtgtcagaaggacaccccgacaaggtagccgatcagatatcggatgccgtgcttgacaaactgttggcttacgaccccagttcgaaagtagcttgcgaaacactagtgactaccggacaagtggtgctagcgggtgaagtgaaaacaaaagcgtacgttgatctccagctcatcgcacgtgaggtaattaagaaaatcggctataccaaaggagagtacatgttcgaaagtaactcttgcggtgtgctttccgccattcatgagcagagccccgatatcaaccgtggtgtggaacgtcaggatccgatggaacagggtgcgggcgaccagggtatgatgttcggttatgctaccaatgaaacggaaaactatatgccgctttctcttgatctggcacaccgcattctgcaagtgctggctgatatccgtcgtgaaggaaaggtgatgacttaccttcgtcccgatgcaaaaagccaggtaactatcgaatatgacgacaacggaactcctgttcgtattgatacaattgttgtttctacgcagcatgatgactttatccagccggaagatgattcgcagactgcccagctgaaggctgacgaagagatgttgtctatcatccgtcgtgatgtgattgagattctgatgcctcgtgtgattgcttccattcatcatgataaggtgttggcgctgttcaatgataaaattatctatcatgtcaatcctaccggaaagtttgtaatcggtggtcctcatggagataccggtctgacaggacgtaagattatcgttgatacgtatggcggcaagggtgctcacggtggtggcgctttctccggaaaagatcccagcaaggtagaccgcagcgcagcttatgcggcacgtcatatcgcaaagaatatggttgcggcaggcgtagcggacgaaatgcttgtacaggtgagctatgctatcggcgtggctcgtccgatcaatatctttgtagatacttacggccgttctcacgtgaacatgactgacggtgagattgcccgcgttatcgaccagttgttcgaccttcgtccgaaagctatcgaggagcgcctgaaacttcgtaatcctatttatcaggaaacggctgcatacggtcacatggggcgcgaaccgcaggtggtaacgaagaagttcttctcccgctatgaaggagacaagacggtagacgttgaactctttacatgggagaaactcgactatgtagataaaattaaagccgctttcggtctgtaaatagtctgaaaccgagcttgacttatttgataagagccgcaatttcattttccttttcggggaaaggaggttgcggcctttgttttttttcgtaattttgcagggtgatacaataaaatcgtagcaatgaaccagatacattccgtatgcgtatatagcgcttccagcaccaagataaatcctgtatattttaaagcagccgaagagttgggcagcttgcttgccgaacatcacattcgtctgattaacggggcaggcagtatcggcttgatgtgtgccgttgcagatgcggtgttgaagaatggcggtgaagtgacgggagtgatcccccgttttatggtggaacagaattggcaccataccggattgacagaactgattgaagtagaatccatgcatgaacggaaacagaagatggcaaatctgagtgacggtattgttgcattgcccggtggctgcggtacgttggaagaactgctggaaattattacctggaagcaattggggctgtatctcaatcctattgtcattttgaatgtaaacggtttctttgatccattactggaaatgcttgggaaggcgattgacgagaattttatgcgtcaacagcatggagatatatggaaagtggcacagacacctgaagaggcgttgagattgctctatgagactcctgtatgggatatttccattcgtaaatttgcggctatatgattgtggagctgtttacttccggtgttgaaggcattcctgtctcctattctccccgtacagatgatactattgctctgaccttgctggtttgcttttttctttcgtctattgctttggctaaaggaaagaaatttctgtctcagcaagtgaaagattttgtactgcatcgcgaacggacaagtattttcgatagctctacagcggctgatgtgcgttatctgctggtgttagtattgcagacctgcgtgttgtcgggtatcacttttttcaattattttcatgatacgtgccctacccttatggatcatgtgtcctctctcctgctagtgggaatctatgtcgtcttttgccttacctatctcttactgaaatggttactttatatgtttctggggtggactttctttaataaaaacaggacaaatatgtggctggaatcttattccgcactcatatattatattggatttgctctttttccgttcgtgctttttctcgtttatttcgacttgagttttaccaatttgattataatcggctcaattattctgattttcaccaaaatgttgatgttttataagtggataaagcttttttttcatcaatttggcgaccttttcctattaattttgtacttttgcgctcttgaaatagtaccttgtctgctactctatcaaggtatggttcgaattaatgatatattgctaataaaattttaggacgttgaaaattaaaaaagtactagtttcgcagcctaagcctgcgtcagagaaatctccctattacgacatagcagagaagtatggcgtaaaaatagatttccggccgtttatcaaggttgaaagtctttcggcgaaagaattccggcaacagaaaatttcgattctcgatcatactgccgttatattcacttctcgtcatgctattgaccatttctttaacttgtgcaccgagttacgtgtgacgattcctgaaacgatgaagtatttctgtgtgacggaagccgttgcgttgtacatccagaaatatgtgcaataccgcaagcgtaaaattttctttggagctacaggaaagattgaagacctgattccatccattgtgaagcataaaacggagaaatatttcgttccgatgtcggacgtgcataatgacgatgtgaagaatctgctcgacaagaacggtatacagcatacggaagctgtgatgtatcgtacggtcagcaatgattttacacctgatgaagactttgattatgatatgctggtattcttcagccctgccggagtgacttcattgaaaaagaacttccctgattttaaccagaaggagataaagataggtactttcggttccactaccgcacaggctgtacgcgacgccgggcttcgtctggatcttgaggctcctacggtgcaggctccgtcaatgactgctgcgcttgatatgtttatcaaagaaaacaataaataaacaaagtgggtatatatactttgtgcaaagccgaaaggctgaatagtaagattttgatcggaaagatgtttgagggcggcatttcaaagtcgttttccatctttccgatacgcgttgtatatatgcctgtcgaacaaggcgaggcttcggcttccatactgatcagcgtgtcgaaacgacgttttaagcgggcggtaaagcgcaatcgggtgaaacgtcagatacgtgaggcttaccggaagaataaatccatcctgcaggaatgtctgcaaggccgggaacagcatttggcaatcgcctttatctatctgtcggacgagcttacagcgactgccgaattggaagagaagatgaaaatagcgctttcgcgcatctctgaaaaactgtcctcatgaaatttcatggtttccgaatatctgtcagctggatattcgtaaaagatatgctgcggagagtgttttcattcttgctgcttattcctatttatttttatcgggtttgtatttcaccgttaactcctccttcttgtcggttcacaccgacctgttcggcctatgcagttgaggcgattaagaaacatggacctgtaaaaggcctgtatctgactgtgcgacgtattctgagatgtcatccgtggggtggctcaggttatgatcccgtaccttaatcatataaataaaaagtaataatgggagagagtgatataaacgctgttaatgctattttggatattcatacccataagggagaggaacagtccggtggtaaggcgattatcaattatcgtcagttggcaggaacgccgttgcaagagggatattattattctgtcggcattcatccttgggaactgacaccggataatttgaaacagcaatcggattttattattgagcatttgcccgacaagcgcattgtggccataggagaggggggactggataaattgaagggagcttcaatggaaattcaaacggcagcatttatggcgcagatgactctgtcgatggaatatgatttgcctctgattcttcacaatgtgagaatgacggataaaatattggctgtgaaaaagcaattccggcccggacagccctggatatggcatggctttaggggaaagcccgaacaggcggaacaattgcagggtaaaggattgtatctatctttcggagagttttattcggatgaagcaatgagagcggtatccgatgatcgtctgtttctggagacagacgaaagttcgcttgatatcgaagagcttctgtatcgggcagcccgagtgcgtggggtaggagtggaaacactgcgagaaaccatccgccggaacattcaaaatgtcttttttagggcataagagttgtatcttccgagaaagagtcgtacttttgccccctacgggattgaaatagaataaaaacctaataattaaagagtaatacgatgaattttgtagaagaattgagatggcgtggcatgttgcaggacatcatgccgggaacggaagagttgttaagcaaagagcaggtgactgcctatttgggtatcgacccgactgccgattcgctacacattggtcacctttgcggagtgatgatccttcgtcatttccaacgctgcggtcataaaccgttggcattgattggtggcgctacaggtatgattggtgacccttcgggaaaatcagcggaacgtaacctgctggatgaagagacattgcgtcacaatcaggcatgcattaaaaaacagcttgccaaattcctcgacttcgagtcggatgtgcctaatcgtgccgaactggtgaacaactatgactggatgaaagatttcagtttccttgatttcgctcgcaaagtgggtaagcatatcacagtgaactatatgatggcaaaggattctgtaaagcgtcgcctgaatggtgaagcgcgtgacgggttatcatttaccgagttcacttatcagctgcttcagggatatgatttccttcatttatatgaaacaaagggatgtaaattgcaaatgggcggttctgaccaatggggtaacattacgactggtgccgaattgattcgtcgtacgaatggaggagaggtttttgcgctgacttgcccgttgattacaaaagctgacggcggtaagttcggtaagacggaatccggaaatatctggttggattcccgttatacgtctccttacaagttctaccaattctggctgaatgtaagcgactctgatgcagaacgttatatcaagattttcacttccatcgagaaggaagaaatagaagctctgattgcagaacatcgggaagctccgcacttgcgtatccttcagaaacgtctggctaaggaagttaccgtaatggttcattccgaagaagattataacgcagcagtggatgcatcaaacattttgtttggtaatgcaacttcggaagcgttgcgtaaattggatgaggatacgctgcttgctgtattcgaaggcgtacctcagtttgagatttcccgtgatgcattggcggaaggtgtgaaagctgttgacttattcgttgataatgcggctgtatttgcttcgaaaggtgaaatgcgtaagttggttcaaggcggaggtgtttcgttgaataaagaaaagctggcagcttttgaccaggtaattacggcagctgacctgcttgatgagaaatatctgcttgttcagcgcggtaaaaagaactattatttgctgattgcaaagtaatagctcattatttattaggtagcaaagtaaaaaaatgaatgaaatatttggaggtttgcttgcaaacctctatctttgcaccgctttttaacagaaagcgcataagtttggactatggtgtaatggtagcacaacaggttttggttctgtttgtccaagttcgaatcttggtagtccaacaatctaacagtttagaagatacaaacccccgcaaaatatttacttttgcgggggttttttgtagcctttagcgagaaggtgttttgatgggtcaacgtaacaatctgagggattctatatttaagcatataatttagcaagtctatataagaaaaaagctctatctcttactcctctgaactgtgctctaaatgctttgattttagcattgaatgactctgctgcggcattggttgccctcctttcaaagaaattgattatatccagataatgtgtttgtatagaacgtgcgacccttccaaaggtgaggaaccctgatttatctacttcatcataccaccttgccagccttgtcaaagcaatatccttaaacttacactgatgatagattaagcctaaccgcatagacagataatatcctttctttatatcgggatattccttgaaaagaatttcagcccgtattctttgagactgagtccataaggattccttcttgtaaagcagataaatacttctcgctaacaactgctttcttgtatctccattagcgaaaacaggtgcatgatacatctttccacaggcctttgcataagcaatctgagtggactcttcatccaaagcctcccagcgagcttttacacgcatctcctgcacagcttcataagctaacttctgtacgtgaaagcgatcggtaacacgtttggccgaaggaaagcagatgcgtgcaatctgctccatgttaggagccatatccaaggttatctcgcgcacttggtaacggcggcgacgggagagcttaagcaggacagaagtgaccgtatgaacgtccgtacctttaatgatggcaatcatactacctttaccaccgtgagcttctttattggtcagtacagtatagagttccccacgcgagagggctacctcatcaatacagatataagcaccgatattcttttcgaatagtagccaatcctctgcatgaacaagttggtcccaatggagataaccacttagatggttacggtattgacgctccaataaatccccgtcaactccatataaaacacctaagagcttgcaactgatcggatagctatcaatatagttcttttaaaaaagacgcaaaatcttgcgtcatacgagtaccttcagccaccatacgccagttacgagagatatactcattatgcttctttaagagccagcgacgacgacgaatattaaggaagaccttcttgccacggagaggaaaatcctgaacaataacagggtcataaaagcctttactctcagtatcctgatctgtatacttctcaggaacgatatttttctcctcaaggtagaacacaacttcatttacactttccttcacatcaacaagatcaaagtagtctaaagtgccttcaggaagaagaaggcgataaccgtttaattccataagctatgaatttggagacaaagataacaatttataaatttacccctcaggtttttacattgacccttttgatacacctttcatgaagagcgtcacttaatagtgaaggatgcttccaggtttgcgttggagtctctgcctatccatagtttgtactcacctttttcttgtccccaagtcatatctttgcgtgtgaaagagaggtcttcgggagaaaggttgaaagtgactttctggctttctccggtaattcatagctttttattttttgagcaaagtaaagcttttcttgctttctactcaaattccggacgtcgtatcgaatacgtcagtatgaaaaaagagaatctttttactactatttctatactacattggtagataagtgattgtgtattagttgtgtgtatctgctatttgtcttttgtttcctgctgtccatttcatccgtttttatgcgctgtttagttatttgatgatgatatggcatgtattcagacctgattttgtatcttgtttgttttttgccggtagtcttaaaaaatacaatactctcctcgctttaagtaaaaacttcctccgaaacgtattatagttcgttaaaaaagtgtacattgcaacgtttctggacatttttgatggataattggaacaaaattgtaatgttaacccgttttcttttgctatttttgcatcgtgtacgcaaacgacgtacatttagcagagaggcttattcaataactaaataaataaagtatgaaaacgaactatgaaattcgctatgccgcgcatcccgaagatgcaaaaagttatgataccgcaagaatccgtagagattttttgatcgaaaagatatttgtccccaatgaagtaaatatggtgtattccatgtacgaccgtatggtggtaggtggcgcgcttcctgttggtgaggtgctgaagcttgaagcgattgatccgttgaaagctccgttcttcctgacccgccgtgaaatgggtatcttcaatgtgggaggtcccggtgttgtaaaagcaggtgatgcggtatttgaacttgattataaagaagccctttatctgggttcgggtgatcgtgaggtgacctttgaaagtaaggacgctgcccatccggctaagttctacttcaactcgctgactgcacaccgcaactatcctgaccgtaaagtgacgaaagctgatgcagtcgttgccgagatgggttctctggaagggtccaatcatcgtaacatcaataaaatgctggtgaatcaggtacttcctacctgccaattgcagatgggtatgacggaacttgctccgggaagtgtatggaataccatgcctgctcacgtacatagtcgtcgtatggaggcttatttctactttgaaattcccgaagaccatgctatctgtcactttatgggcgaagtggacgaaacgcgccatgtatggatgaaaggcgatcaggcggttctttcacccgaatggtctatccactcggctgccgctacccacaattatacctttatctggggcatgggcggcgagaaccttgactacggagatcaggatttctcattgataacagacttgaaataaacaactacaataattttcctaatttaataacaaaaaattatgaatcagtttttgaatttttctttggaaggtaaagtagctctcgttacaggtgcttcttacggtatcggatttgcaattgcttctgcattcgcagaacaaggtgctactatttgtttcaacgacatcaatcaggagttggtggacaaaggtatggctgcatacgctgcaaaaggtatcaaagctcacggttatgtatgtgatgtaacagacgaaccggctgtacaggctatggttgccactatcgcgaaagaagtaggtacagttgatattcttgttaataatgcaggtattatccgtcgtgtgcctatgcacgaaatggaagccgctgatttccgtaaggtgattgacatcgacttgaacgctccgttcatcgtttctaaggctgttttgcccgcaatgatggagaaacgtgcaggtaagatcatcaacatctgctctatgatgtctgaattgggacgtgagactgtatctgcatacgctgccgctaagggtggtctgaaaatgctgactcgcaatatctgctctgaatatggtgaatacaacattcaatgtaacggtatcggcccgggttacatcgctactccgcaaactgctcctcttcgtgagccgcaagcagacggaagccgtcacccgttcgattcattcatctgcgctaagactccggccggtcgttggctgaatccggaagaactgactggccctgcagtattccttgcttctgaagcttctaacgctgtcaacggtcatatcctttacgtagacggtggtatccttgcttatatcggaaaacaaccgaaataatagtgagataacgagatattccgataaggtgatagaatggtaaagagcttcctcttttcgtctgtcaccttatctttttattattcattcaatgtagattaatcatgaagaagatattaattctggttgctgcagtcttgatgggagttgcttcctgtgctgacagcaaacaggcaatgacggttacagtgaccaatcctttggctttagagcgtacaggggagatggtggaagtaccgatgagcgatgtggttgcgaagttgaaactggcggacacggcacagattgtagtgcttgatgcggacggacagcaggttccctatcaggtgacatacgatgaaaaggttattttcccggctacggtgaaagctaatggtacggccacttataccattcagccgggtgctccggaagcctttaatgtgattgcttgcggtaaatattaccccgagcgtcttgatgaccttgcttgggagaatgacttggtaggtttccgtgcgtatggtcctgctttgcaggcaagaaacgagcgtggattcggttatgaccttttcacgaagtataatactaccgaaccgatcttggaagctctttatgccgaagaacttaatccggagaagcgtgcgaagattgccgaactgaagaaaacggaccccaaggcggctgccgaacttcaacgtgccatctcttatcacgttgatcatggctacggaatggattgctatgcggtaggtcctacgctgggctgcggtacgtcggctttgatggagggtgatacgattgtctatccttactgctatcgtacacaggaaatccttgataatggtccgttgcgtttcactgtgaagctggaatttaatccgctggtggttcgtggagattccggtgtggtggaaacgcgtgtaatttcgctggatgcaggctcgtatttgaacaaagcggtgatttcgtacaccaatctgaaagaaacaatgcctgtggctacaggattggttttgcgcgaaccggatggagtaacgatggcggacgctgcgaatggctatatcacttatgtcgatcctacaaccgaccgtagtggtggaaacggcaaaatctttgttggtgctgcgttccctgcacaggtgaaggatgctaaagtagttcttttccaagagaaggaaaagaaagaacgtggtggggccgatggtcacgtgctggctgtcagcgaatatgaaccgggttcggaatatacttattactggggatctgcgtgggataaagctgctatcaagacggcagaagcctggaatgaatatatgtcccaatatgcacagaaagtacgcacaccgttgactgtggcttattaaactgttttgggtataaaataccttgtttgtaggctgttaatacttgtcgtctcaggtattaacagcctatatattaagtgttaatacctgagacgacaggtgttgatactctatgcggcatattttaatagcctgtatgatagctaatagctgcttgtatgccaagagaacttcctgatatattgtttgctaatatttcatttgctgatttactttttgctattgtttctttgcatgaaagaaacttttgcttatttttgtcttctgtagaaggaaagattttataaaaagtgtctttatgggaaagaaagaattactaaaacaactgattgcgggatttcaggcattactgccaatagaagtctaccctcgtgaacttactttgccgcttgatagcgggaagattataactgtgccgggggtgagaaggtgcggtaagtcttctttgttcctattgacgataaatcagcttattcgcgaacggattattgcgaaggagcaaattctgttcctcaatttcgatgacgaacgtctgcacttgaatgtagataatctagatgaaatacttcaggcttatcgggaactctatccggcaattcctctgaaggatgtatatatgttctttgatgaagtacagatggcggatgattggcaaccttttgtaaggagagtatacgagcaggaatgcaggcatatcttccttaccggaagtaactctcgaatgctttcctccgaattggctacctctttgcgtagccggacattgcaatacgaagaattcccgttatcattcaatgaattttgtaactttaccgatatcaatacaaactattatgtgcctgagaatcgagccaagcttgtgaatgcgtttaagacgtatttgcatggagggggatttccggaagttgtattggcggctccactgtataaagacaggattttgcaggaatatttctttgtaatgctttacaaagatcttgtagagagatatgaaataaagaatccggaaccgatacgttattttataaagcgcgtgatgtcgaatctggctaagcctacttctatcaatcgtatttacaatgaattgaagtcgcagggagtcagcattgggaagaatacgctttatgatgtgattgtgcagacagaatctgtctaccttttcttctccctgacgaaatatgagccatctctggcgaaagagagcacaggagataagaaatattattgcattgataatggtttgcgctccgtcctcttaaatccgcatagtgaagataatggaaagcttttggagaatgcggtctttcttcatttgcggcggaacctgcgaatccaagaggagttgcattattataaggggaagaaagagtgtgattttgtagttgttgaatatgataaagtgacgcgattgattcaggtaagttaccaaattggggatgaggagacccgtaaacgggaagttgatggtttgttggaagcagcccaagcgacaggttgccgggaactgactatcgttacgatggaagcagaagccgaatggaaagaacaagatatgtctattcatgtggtacccgcctggaaatggatgcttagttgagggcgccgatatgaatcggaaccctcaacttatgtgaaatatattttgggtacattgcttattgagcgattttcttcagagtctctttttcatataattcccatccggtttctttccaatgatattcccatacaagtttgtctgcggatatctctacaattttcataatatccggatcctcataatcgtatccaccgtcattcggataatagaagataagatggacagagccgttttttaactcccatttaccggtttcactagggttactgcttcctttggagtaactattgaaggtcatatcagatttcagttcatatcgtctgctgacatagtatgatggattgtcctcttcgcgttcaccatcttctatttcatatccgctatgttcgacgacttcccacatacctactaattcatctactgatccgatggagtcttcgtcatcgtcgccacaggaatacatactgaatgataataatactacggctacgcaagtagccagtttccataatgttttcataactgattaattatttattaatatttgatattattgtttggtaaagtagagttcatgatcattatattcgactatcatttgattttctgatatagatagaatttgattccatatccggccatgggcttagagtgattattccgccttctgtatcttttgtacagatataagtacctttttctctaccgtcaagtgtttcgtttatatacttttttcaataaaaatctccattgggttcgaatttccatacccaatggtgattattctcctcaatttgtatccaagtgccccataaggtttttgcatcatagatatagaatatattactgattatttgaaaaaacagcattcaagtctctttttacggagagaggagaacatgaatgctgaatgaaaaatgatattgaaaggtctgattttactttttttacaatcttgttggtagagtttagaatgctacacctaaccgaatcagtacgttgcttgtatttgattcccaagttttgataaatccgcgttgataggtaatgtcgaaattgaaacggtcgtaccatatgcctacgccgatattcattcctgcgtcaaaacgtttccagtcatcccaatctccaattttcacggtagtttcttctgttttaccattgtagtcctctttttcggtgatttttcctaagtagtcacaacttacataggctccgagatgtgcgtctagtgcaatattatttgtgatgttgtacttatatccgaatgtaaacggagaaatttgtacgttgtgtgctatttggctgatttcgtaatcatcttcagagtatccccaaccacgagagccaaggccgaattccatcccccaataggttcctatgcttcccatcggtttctgaaagccatatatgaagttgtaaccaagtttgctaccactttcatcatcgtctcctgtcattttcataacgtttaagccaccgcgtaagaaccactgcttgttagactgttgtttttctgttcttacaatggaacttctggatgatacgatctgtgcctgtgtgcctacacataagagaagtgcggctacgattgataatacttttttcattgtttcttatgttttaatagttaattattggtttttacgaccggtgctattacccctttctcatccgtaggagcgagtttctttatccttatccattcataatcgtccttagtggcggtgtaccatttactaaaaacggcagggaagcctaccaccgttactgtgtagcctccttcatcgttagtttccactttataggtggctgccatgataacgtcgctaccggcatcttcgttggctttataagtagcccatgaacggacattgcccaagtctcctttcaatccgatttctacttcttcacgtgtgaacttataggtgaatacttgtcgtttgggagtctctcctcccagcagcctgacttccgctactacaggttttacacatacttcgcttactgcatcacctgcacgcgattgtgcgtcacgaaactgaaatgtagacttttgagcatagctctccaatgtacaaccgagaatcaatgcaattaatagaattagttttttcatcttcatcattctgtgagttttgttaatatgtcgcaaaggtatgtgaaaggaacataacaaaggggaaacgggtagttcctaaagggtgacaaatatgtcgcctatttggagacagtgttcgtaggagggatgaggttgatcgtatcggacaagtctctgaagaagtcgtgattgaggatgcaggatatacgccaaagcaattggatatcaatattctctttgtggaatattttatagacattgggacgggtacaacacaattgggcagcgaaccaagtgacgctacgtccttggtcgtgaagaatacgttcgataagctgtcctgcatgaatcatatccatacaactctgtgtgtttcgcccagattcccgtaggtgaactaattttagtaaatgtaactttggaagaatatatatgaaaaaggcgcgggaatcttaccttcgtccgttccgtgttcaaggccttcgcaatgccagctaccgggaacgaacaacgcagaaagcccacgccgatatgtacaacacccgcagcctctctttgtttttcaaagcgaggcacggatgtatataagcacacatcaggaggacgtcttcgttgcagctcgtcattccggtagaacgaaatttgcgaagttttgaacaccaatgacaaacgcttgtaaacgtcttctcaatataaaaacggctccccctcaccacccgaaggctttctgcggaagagtccgttgcaaatgtaaataaaaaaatgagattatgataggataggagggaatatatgctttgaattatacgatttatgtaattcaaagcatataatcagagtcatttatgagatatcctagaatactttaaactcgtatccttctgcttttaggaattcgatggcacggggtagggcatattgcaaattcccgttgttccaagatttcagtgagtcgtggaaggtaatgatagagccgttacgtacatagtgtttcacgttgtccaatacctgttcgggacgtatacatttactgtaatcgcgggttacgaggtcccacatgatgatgcgatagtggtggcgaagcgtatagtactgccggaaacccatatgcccgtgtggcggacggaacaggtctgaatggataatctcgtctactttcttggcatttgccagatagtccggattggaatactcaaatccgcgaatatggttgaatgtgtggttgccgatgcggtgtccgcgctctactaccattcgatattcatccgggtgcttgcgtatattgtcgcctaccatgaaaaaggtagctttgatgtggtgtttttccaataaatccaatatccaaggagtaacctccgggatgggtccgtcatcgaaagtcagatagactgcccgtacgttcggatccatccggaagattgcttgtggatacaacgcccggaaaaaccaaggtggttgttctataaacattgtactaaattactatttccctttcattctcgtcacatactcgttgtataattggtcgagttgctcggagtaatgttttgcgagtttttctgatttgtatttctccattaagcgaatttccgcgtcaagcaagcttgcgttatatacgaaattctctccggcaatggcaagctggttatcgttcagactgagataccagatcatatattcgagtgacttgttggcaaggtcgtcaatgatcttgttggccttctcgttctgacctaattgatagtaagattctgccatttggaaagcaccgtttgcccagtcatacggcacgttgtaagccggaatcaccttttctgcatagtcgagcgcagcgagtgctttatctttcttgccctctttgatgagctgccctacgagttgcgtgaagatgcgacgatgtgtgtagcacatacgcatcacgttctcgtcgatgtatatgcccggctggtcgatgccaccgaacttgaactttttcatcaggttgccgtacatcttttcgctgtcaatcttgctgtccagcttttccgtatcgaacggagtgaagcggtaagcgagaccttcctgcgtgaagtgattgcccatgcccaaatggttctctccgcctacggtgattgccatatagataggacgttcccagttggcgttagcgagcatttcgagcatcatcagttcattcttgtagagcgcacgtttcgggcttccgttggcgtctctgagggtgatcgtcatatattcggggatagagtcgcccaaagcttccggtatcttcatgccggagcggcgtacagcttcttcgtctatcttcatcacgatactgtctgttggaatcagcgggagctgtatatcctttccggtctttttgagaagctccttcagctggtcgttcttgccgagcatccagcggttgatgatttccttcagttcataggggttctcaccgaagatggagtgtacgagcgataatatggtcgtatctcctttggcagccaattcgttagcttgcttgaagtaactgtcgatgaaggctttcatttccgggcgtaccgggatatattcattttgtccttccacatactccacacggtcccaagtgatagggagcgatggagaatcgtatgccggacgcttcatctgatcgatgtaccaatccgtttgcaggtagcttaggttgcaggtacgggcatctgtgcggaagccttctgtttcctgattgtaccacaaggggaaggtatcgttatcaccgttcgtgtagatgatcgggttgcctttttcctgcagagtcatcaggtagttctgtccgaagtcacgtgccacaaaacggccactacggtcgtgatcatcccacgtctggcttgccatttgtatggggacaagcaaacagatgatggaaaggatgcacgccattgccgcagacggtttgtacgggatgtaagtttcgtatagcgagtcgagcttatattgcagctcggcctcttcttcttccgtgataaacttcgctcttttctcttccagcgtttttctaatcttctcggcttcttcttccgtaactcctgcgatgaggcgttgttcgggtttcattcttgagcaccactgaatcagtcctgccactcccataccgacccagatagcgaaagcatagaacgaaccggcatacgcatagtcacgttcacgaggctgtgcgggtgtctggttgaggtagagcacgatggcgatacctgtcatgaagaacaggaagaatactacccagaattgctggataccacgctggttgcggtaagcctgccagaagagtccgatcaatccgagaatcaacggcagacagtagaatacattgtgccctttgttgttcttgagatcttgcggaagcaattcctggttgcctacaagtatgttatctatgaacgggataccggtgatccagttgccgtgttctatctccccgctaccctgtatgtcattctgccgtccggcaaagttccacatgaaataacgccagtacatgaagttcaactggtaggtgaagaagaatttgatattttcccactgggtaggcatatttaccattaccatttccccgcattggtcgtatggcacatcatggcctttcacgtccacccattgcttgtaaagttgggcgtgtgaggaactgtacatacgcgggaaaagcatattctgcgcatattcgtactcgatacgtcccggaagttcgatgtaagagtctttctcgtcgggagaaatcttctctttgcggacatacttgctgcccgtttccgactggcgagggatgcaatagccgtcttttacgtcaagcgctacttttgaagagaaagcaggaccgtagaaaagcggacgtgtcccgtattgctcacggccgagatattcgcctagcgtgaagatgtcttccggcgagttctgatccatcggagtgttggcggtggaacggatgacaatcagcgcgtatgaagaatatccgattacgatcatcatggtgcatagcatggctgtattcatggtacgtgcggaaatacgccatttctctttgattttagcctgtacgttcggagcaagataaatgcccaaagcggcaataaccagaataccgataacgatactgcttgggccatgaccgtagaacgggatacccagcaaggcaatcgtcaagatgaatgaaatagccatgcgcgtcttgtccttttcggtgtagctttcgtatactccccaaatcaaggcggctgcaagcaggacgatataaactacaacgccggaattgaacgacattccgagtccgttgacaaacagcagttcgaaccatccgcctactttcacaatacccggcacaatgccgtagagcacggcggctactaatacgcctgaaccgagtagggctataaaagagccttttgcagtagcgctcggagttttcttgtagtagtataccagtacgatggcaggcagacagagcaggttcagcaaatgtacaccgatacttaagccggtcagataagcgatcaggataatccagcggtcgctgtgcggttggtcggccacgtcttcccatttcaaaatcagccagaaaacgactgcggtgaacagggaggagaaagcgtatacttcaccttctacggcggagaaccagaatgtgtcgctgaatgtatataccagtgcaccgaccagcccgctgcccataatggtgataagctgccctttggtaatgttgttctcgtcggtgatgataagcttgcgaaccagatgggtaatactccagaaaaggaacaggatacaggcaccgctcatcagggcgctcatgtagttcaccattttcgcaactgtcgttacgtcagaagcgaactgtgtaaaaagattcgccatcagcatgaagaaaggcgcgccgggcgggtgtccgacttccaatttatagccggtagttataaactcagggcaatcccagaaacttgcggtcggttctatcgtcatgcagtagactgttgccgcaatgatgaatgtaagccaacccatgaggttgtttacggttctgtactgtttcattagcactatggtagtttattcgttaaaaacaagttatgcagtcgcaaagatagtgatttaactgcataatgcagaagaaagtaagatttattaagtataagggaaactctttgatagttaatgatggtgatgatgctctcctaaaatccggtgaggcaatgtgccgtgtcccaatagctcgatagggcagttgaagtttctttccagccattccgtagtaacgcctgtatccggatggtaatccaatgtttcgttgacacaagcgatggattttacctgttgcagcacggtgccgatgtcgtggctgacaaggatgatggcgcactctttattgatttcagccaataactcataaagacgcgcttcgaaacgtttgtcgatatacgtgctgggttcatcgagaatcaataccgcagggtcggagataatagcccgtcccagcaaggcacgttgcagttgtccgccgcttaattgtccgatagaacggtgttctagcccttccagtcccatacgggagataatctgtttgcctttctctttctgttcggaagtgaatcgggaggtgagagacttttgtatgctcaatcctgacaggatcacttcttccaccgaaataggaaattttttgtctatggtgctgtactggggaagatagccgagtgagggctgaatatcagccccttttgtggcagggatgtgtaaaataatctctccccctgtcggtttcagcagaccgaggatacacttgataagtgttgtcttaccacctccgttgggaccgataatacctaagaaatcacgttcgtagacgttcagattgacgtcatggagaacagtgcggccgtcatatccggcggataggttctttatttcgatgattggtttcattgcttgaaatggctaggcaggttcttgattcttctattttgcttcagcttgcggagcaagtgcttgggctacgttcagcatttcttcttcccaatcatagcttaacggattgatggggacaactttcgttccggtttgctgcgcgatggtttccgcattgcgcttgtcaaactccggttgtacaaagatgacctgtacgttttctgcccgacatagatctattaattccttcaaatgagcaggggagggttcttttcctccttcttcgatagaaatctggtgcagtccgtagtcgcgggcgaagtaggagagagccggatgatagatcataaaggctttggctgcctccggtgaagaaagttgttggcgaatcaggctgtcggtatgttgtatacgttggcagagagagtcgtagcgagccatataataggcgtcattggctttatccaattggctgagggctttataggtatttcctgcaataattaatgcattggcggtagaattccatatatgcggttctacagcatggatatggtcgtcgtgggggctatgtccgtttccatgtccgtggtcgttattgttcaagataaggtcgattcctttggaagtatcgaatacctgaatatggggcgtattgttcatcaagcggtccatccaggtttgctcgaagccgatatatccgatgcggaagtaggctttgctatcccctaaagaaacaagttgctggggaaccggatcgtatgtttccgggctggaacctttgggaaccatgctgagtactttgaacttatctcccgcaatggcttcggtgaagtaacgttgaggctccaacgtaaccgtaattacaggtttctcttcataactgttggtttgggacgggcgtccggcacaggctgccaataataggcagacacttcccaagaataggtttcttatatcttttagttgtttcttcattgctctttctatttcgtgattttctatcttatttctcatttcttgtttttcgggcgcgcaatatctcccgttttcctcccggaggtcccggaaggcgttctactgtgaatccggctgtttgtaacattctccggacaacccctttggcacaataggtagtcaggatcccgccttcgtctaataaaacgtgaagacagttgaatagttcttgcgaccacatttccggttgcttttcgggggcgaaagcgtcgaagtaaaccaaatcgaattggaagttgaaagtgctttcaactttcaattgatttgcgtccttttccattttccgcaggatgaaatggggagtgagttgtacgtcttcttgccagggagatgtgtggagttgtttgaatagctcgatggatggttgcagttcaccgtttaccaataattgttcgtcattgcggacatatccgagctcttccactgtctgccattccaaaggatataattccaatccggtgtaatgtatatgtcggccgctctgttcggcctcttcgagggtgagccatgcgtttaatccggtgccgaaacctacctcaagaatacgtggggcggtggaagcagaagccttcagtcccatctcaataaagatatgttgagattccgtgcgtgctcctttcgtcgaatgataatgttcattcaattccggaacaaacagggtagcgctcccatcatcggttttctcaataattcttttcatcactcactctaatgttttgttatctaatattcttacattcttatgttgccactgcatcccatgcgctttcgagcacatataggagaaggatataacgtattagtttgccgagaaacatagaacctaccgtaatccatgtgttgctccgcataaatcccagtgcgatggcaatcacttcccctatggcggggaggaaggcgaagaatgccatcatggctcctttcccttgcaggaagtttaccatcttgtctactttttctttctttaccttgaaatatttctcaatccaggcgattttgcctaagcgtcccatgtaataacatgtcattcctccggcggtattccccaaagtggcggacaacagacaggcgataggaggcaagccaagcttgattaaggctaccaataccagttcggaactgaaaggcacgatgctccccgccaataaagccgagataaataatcccggaagtccccattctatgaggagttgtatcgctgagtctataaaagcgtccatatattgaatgcgaataaaagggtgagactgactaaggaaatgatgaaaaatacattcgaacttttgctgttggtcagtacaaaaaagtgtcctatcagaatactgttgctaatcataagcaatggcaacaggtcattgcagtaattcggttggatggctatcagcaggaagaggaagatggtcaagtctatcaggaattgcagataggcgcgtgtgcgtatcttatcttcaaacccggcagcgatacaatgaacagcactgacaataaacagtataagcagatatcccaatatcgccagttcccaagactgaagggtttgtaggtggaaagcttctccgaaagttgacagctcgataaaaggacggtagaacaggtccatctcattgtagaagaatgcgtgtccgaacagaaaccagtaaggcaacatccagccgagcagtgccccgcagaaactgcgtagggtgagagattggaaacgataagcctcaagtatccaaagtaccgaaaaaacagttagttggggaaaaatgatacttcccattccgataaagaggaaggaataaaaaagataacccgccgcgtgtgattgctggtagcttctgaacaggaaatagatggatatcagagaagccaaagcggcaatatctcccgcatatagcagatgcatctccggacagacggtgacaaacaggaagtaaatggctgtctgcatggaagccctcatacggataatgccgaactgattgttcagttctattaagaaatagccgataatggcgtagattaggaagctgacgatctgttccgcccagcccggaagcaggaagctctgtatggattgccagaagaaaggctggttgtcctgtgtggggatggatgcgagttggggaaataaaaaggaggtcgacacccagcaaagagtgcagataagggtaacggcaggcagggtgaaccgtcctgccgttacttgattctgtaaccttttatttctcattcgtctattataaatcgaatccgatatcgcggcggaagtacttcttgtcgaagttgatcatatccgccaccttatagctctgcgccaatgcttcttctttggttgcaccgtaagagcaaacggcgatgacacgtcctccgtttgtcattacctgcccgtctttcattgctgttccggcatgaaagatgatactgtccgtagcggcagcttgttccagcccgctgatggggaatcctttttcgtaggcttccgggtatccgccactgacgagaatgacacaaccggctgaacgtggatccataaccaatgtcttttcgttcagattgcctgcggcagtgccttcaagcagttcgacgagatcactttggatacggagcatgacgctttctgtttccggatcgcccatacggacgttgtattcgataaccatcggctcgccttttacgttgataagtccgaggaagatgaaacctttgtaggtgatgttttcttctttcagtccgttgattgtcggttcgataatacgtgtgcgtactttttccatgaacacttcatcggcgaacggaacgggggttacactgcccataccgcctgtattcagtcctttatcgccttcgccgatgcgtttgtagtctttggcaacggggaggaccttatagttttctccatctgtcagtacgaacacggagcactcgataccacttaggaattcttcgatgacaacagttgcagatgcagagccgaacataccgccgagcatttctttcagttctttcttcgcttcatccagagtaggaaggataagaacacctttcccggcacaaagtccgtcggctttcagtacgtaaggagcttccagtgcttcgaggaaggccagaccttcttcgatgttggtggaagtaatgctcttataacgggctgtcgggatatgatgacgcatcataaagccttttgcaaattccttgcttccttccagctgtgctccctgtgcggaaggaccgataacggcaatatgttttaactccgggcgattctggaaatagtcatagattccttctaccaacggatcttcgggacccactactaccatttcgatgttttctttcaaggcgaaagtactgatagcgtcaaaatcagttgctttgatattgacattctcacctacggcagttgttccggcattacccggtgcaatgtatagtttttcaactttcggactttgggttattttccatgcaagtgcatgttcgcggccacccgagcctagtaataatatcttcataatgagttggtattatagatgttcttcaaaatatcgggtaattttctcgtgcaaatgtacgcggtcacggcccattacgttgtgtttatggcacgggtaaatgaacaggtcgggataggtgcgtgcgtctacgcaggctttcatgaacgatagggtgtgctgcggcacacaggtgtcatcatgatcgtcatggataatcaacagatggcctttcagctgtccggctaagttcttcaaattacactccttgtagccttccggattcgtttcgggtgtatccatataacgttcgccgtacattatttcgtagtacccccagtctatcacaggacctccggcaacacctactttgaatatttccggatagcggagaagcagggcagtagtcatgtgtcctccgaaactccatccatgtacgccgatacgctcactgtccacgtaaggtagggatttcagatattctataccttttacttggtctttaccttcttccacaccgagacgccggaaagtagcgttctcaaatgctagtccacggttactgctgccacgattgtcgatggtgaacatgatataacctttatttgccatataagtatcccacccgcgtgcaccgttctgccatcctccggtgacacattgtgcatgaggacctccgtagacatagacaatgaccgggtatttcttgcttgaatcgaagtctgccggtttcatgattcggaaatgcaggtcggtagtgccatcggatgctttgattgttccggtttcgatacttggcatttggtaaccttcgtaaggacttttggcggttagcagattgacggtttctttgaacttctttgtgtctaccagattgataatgcggggttggtctttggtcgaataacggtcgataagatatgtgccggatgcattgagcagtccgttatgttcgctttcttgagaggtactgaatggctgattcatctttccgttggcggtgttaacggcgaaatgtccgctcttcaacccctctatggcagtgaagatgatatctttgcgtttggtattgaatcccagaatctcacttaccaaccaatctcctttagttagttgttttaccttacagtattgacggtatgtgccaccgttggcagaagtatgtgtttcgggatatatcttggtgcgtgtatcgaagagataaaggtggttgtagccatcccgctgactttggtagatgaacttggtgtcatcccatggcaagaatacgattggattttgcggttcgacgtatttgggatgtgtctcttcatataaagtctgcatcagctcacctgtctctgcattatattggcagagtttggcatggttctgatcgcggtttacctctatgagataaagacttttttcgtccggtgcccaactgatattggtgaaataacgattggtgggatcgcctgtattcaagtaaatgtttttatcggtagaagggttataaataccgacttgtaccttgtggctggtcattccggccatcggataacgtatgttatttacttctcctacacgtgctgtgatgtctacaagcggatattgagtcaccatactttcgtccatacggtagaaagcgagcaaattgcctttcggactccaaaaggttcctttgttgataccgaattcattgcggtgcacagattgtccgcaaacgataccttcgggttcgttggtgatttgtcgtccgttgacatacagattgttttttacggtataggcgagattcttattgatagcatagtcatagttggcagatggttctttgggtaggtcatctctgccgataacttcttccttcttccaattgtaaacagcatagcggacgtttctaggtagcaatacttccgttttgtcatcccagaggaattggaggtcgtaaagatgagataactttgggtatccggcagatgccagtgctttgtttacttgttcacgggtgaacaggacttcttcttttcctgtttggggttgaaccgaataaagagtgtcgatgcccggtttgatgcattcgtcaccccaccattgcagtccgtacaggttttctgcatagaggtaactctcgccgcccggaatcagttcttccagcatcggctttttggtttcttgtgccataacattgaatccgattggtagtgccaacaataacagaatagctcttttcccaattttactcattgctcttttctttattatttgttttaaatccttctatttttactctgtccaaaggagtctgctttatttgaatggcagcactcaatttggcaaaagcggtgaataggtcatcaaattgcttctcgtagctttctctgtcggaggatatgtcctcttccaagtattcaatccttttcctcaattcttccaattcctgttttggagcatgggagagcaggtattggcgcatgtggacaaaggctcgcatgatgttgatgttgacttcgatggctttttcactatttaaaagacctgatagcattgcgactccttgttcggtaaaggcataaggttgatatctaaaccagtttatttctaaggtgccattttggcaccttatgttgtttatcagtaagttagcttctgtttttgtaagctgaaacataaaatccgcaggaaaacgatttatatttctttttactgttcgttttaggttctttgtttcaatctcatacatttctgccaaatcaaagtcaagcataaccttttgtcctctgatttcatatattttgttttctataataactaattcattcatttttagtctaattggtggtttactatctacgcctattacttaacattattgttgtttgaacttgagatcacaatttgtgacctcatatgtctatcagttagttaataggcaatttggcgtcaatgtataattaaatattgatgcttgtttattcctcttccttcttcggaatcctcggctcccggttccccctaaattctcttggccctcttgaatctcttcctccgcggaattctccccgtggctttctatctctgtcatcacctttgaactcatcaccttctctgcgcggcttgtattctccctctctgcgaggtctggattcaccatcccgacgcggtttgaactcaccctcgcggcgtggcttaaattcttttctctctctgaatcttggagcctgctctccttcagcctctttcttttcttctccctcttcctggctcttgaattctttgtattttccgtcaaaaatctcatatttgcggaactcacactccaacggtccattgaacaaaggaaccttctgacttgctttcaaaccaatctggtcgaaacactcttcccgataagaaagcacccatgcttcgtttcctacaaacgcatgtttcagacgttcgccgatcatttgatagaggccgagcaaatcatttgtagaaatacgttctccataaggaggattggtaatgatgattgatttctcttttggctgttcaaactgctggaacggttggagtttcagcacgacgtctttcgacacaccggcagcttttatattgtgagtcgcaatctcattcgctttcggattgttatcatacccataaatcttatgagtaaactcacgctcctggctgtcgtcattgtaaatctcatcgaacatatccgcatcgaaatccacccatttctcgaaagcaaatcctttacggaatactcccggtgcaatattttttgcaatcagtgccgcttcgataggaatagtgcccgaaccgcacatcgggtcaatcaggtcgcattctccacgccatccggtcatcagaatcatgccggcagccaatacctcatttaacggggcttctaccgcttcctggcgataaccgcgacggtgcagtgattctcctgaagagtccaaagacaaagtgcaagtagtctgtgcaatgtgaatattcagcagtacgtccggattgttgatgcggacagacgggcgtttcccggttttctcgcggaagtaatccacaatcgcatcctttaccttatatgaaacgaactttgaatggcggaattcttcgctgaacactaccgcatcaatggcaaatgtcttgtttacatcaagatattcttcccatggaatggtttgtatctgattataaacctcgtctgcatctttagcagtgaagtttttaattggtttcagaatgcggatagcagtacgaaggcagaaattggctttatacatcatacgtttatctccactgaatgaaaccattcgacggcctatttgaatgtcgttggctcctaatgttgtcagttcctctgcaagtatctcttccagtccttggaaggtcttggctatcatttcgaattgttcgctcatatatattatttgatattatttttttgctttggtttgtacgattcttgctccggcaggcacgttctccgttacccagatgttacctcctacagttgcatcgtgcccgatagtgattcttcccaaaatagtggcgttggaataaacaataacattgtcctccagaatagggtggcggggaatccccttgataggctttccgtcagcatccaacgggaaacttttggcccccaaagtaacaccttggtatagtttgacattattaccgataatactggttgcaccgattacgacacccgtaccgtggtcgatagtgaagtaactgcctattttagctgccggatggatatcaatccccgtttcgctatgcgccatttctgtgatgatacggggaattaagggcactccgagttccagcaattcgtgtgctatccgataattgctgatagctttaatagctggatagcagaagattacctctccatagctttcagcggcagggtcaccgttataggcggcttccacatctgttgccagtattttcctcatggtgggcagtttgctgataaacttagcggcaaggcgggctgcttcttcccgtttggaatcggagcaggcgttgcattttccctctatggaagtactgaaacacaatccggccagaatttgctctgcgagcagatcaaatagtttttcaacgtttacaccaatgtgataattgatagtccggctgttaatggtcgaatttccgtaataaccgggaaatagaatagagcgtgagagctcgataatttcatacaagactttagcagaaggcagtggttcgccatctttgtgttgatgaaacagtcctttgtaagattcgctttccgatagctcatcgactgcctgtgtcagaatgtgggtgaagttcagtggactcattaggtcagttactcatatttatatgggtacaaaggtattaaaaaaataataagattgattgggattcaggataaataatgtattttcacgtggaacatccgattatataatgtgaaatgccacttcttcaccagaagcggcattccttgctattagaatattagaatgagagagagttttgttacatatttgtattatccatcgtaacggtcatttcgggaaccaatacgtaggcttgctttttagtgttccatttatagtaattggtagtgacggttttaccttcgtaaatatagttgattcgtaaatctttttgccattcatccttgtcactgtcccatctcaaagcttcactttcaaccatccgtttgctatcatcgtacttataattgtacttcatgtagttagcaagggtacttccgtccattttgtaaacggtttgtcctattgtcataccattttcttctaccggattgtagatcagttgaccatcattgctgcgcgcagaagtggcaattgatgcaaccagaagaactgctgatacaacgaacatctttaaaaatactttggctttcatggctatttaagtttttgagttattctttcatttttctataactgcatctgttttacgctgcgaaattacatattaatttggtatttatgcaatattgaagatgaaatattatcaaaatgtcagatttgtgcgttagtattgacttgctttttggcaatattggtgacaaaaaaatatccggcagtcaatctgccggatataggatgaatcacttcgttgaaaaagtgttcctttttcttgctttctggttgtcaggttaaataatgttattacttaatccttttgaaattttgctggtatgcactgtggcggtgcaagatgcattatcggttttaatgtgcttcgagccagttctttccccatccgcaatccgcttttaagggaacgtgcatacggtatgctttttccatttcttcgataacgatttcttctacccgttctttctcatcaatagggacactgaaatttaattcgtcatgtacttgcagaatcattttggcttttattccttctgcccggaaccgttggtaaatacgtgccatagccaccttgataatatcggccgcgcttccctgaataggagcattgatggcgtttcgttccgcatatccgcgtacgactgcattccgggagttgatatccggcaagaaacgtttccggtggaaaatcgtttccacatatcctttctcttgagctacccggatactctgatccatgtaggctttcactccgggataggtttcaaaataaccgtcgattaattctttagcttcttttcgttctacattcatccgttcggcaagtccgaaaacggatataccatatataataccgaaattggcggtttttgctttgcggcgcatatcagagtctacctctttcagtccgatcttataaatctttgcggctgttgcagcgtggatatcatgattgctgaggaaagcgtcaatcatattcttatcttcactgagatgtgccataatccgtaattcgatctgtgaatagtcggcggaaaagaaaagacagccttcatccggaataaatgctttacggatttctttcccgttttcgtcgcgtatggggatattctgtaagttcggattgcttgagctgagacgtcctgtagcggtgacagtctgattgaaagaggtatgtacccttcccgtacgtggattgataagttgggggagtgcgtcgatatacgttcccagtaacttcttcagtccgcggtgttccagaattttctccaccaccggatgtttgtggcgaagactttcgagaacctcttccgaagtgacatattgccctgtctttgtctttttggctttttctacaatcttcagcttatcaaacagaacttcaccgacctgtttcggcgaagcgatattgaaagtctcgcctgccagatcataaatctctttttcgatgcgttccatctgttctgtaaaatgagcggacgactgtttcaacgcttccgtatccaataacactccgtttctttctatattgaccaataccgggacgagaggcatttcgatatcatagaacaaacgttcggcgccattctctttcaattctttctccagtacgtttttcagtttcagcgttacgtctgcatcttcgcaagcgtagcggtaaacatccttcggagcaaggtcgcgcatattcttctggtttttaccttttggccctatcaactcatcgatatgaatcgtctgataatgcaaatagatttctgccagataatccattccgtggcgaagttccggttgaagaacatagtgagcaatcattgtgtcgaagagcgggccttttacttccactccataattttggagaacaatcatatcgtacttgatattttgccccactttcagcgaactttcgttttcgaataccggtcgaaactcattgacgatttttaacgcttcttcttggtttgtgggaaccgggacataaaatgcttcattttcggcaatggagaaactcattccgaccaattctgcatccatcggttccgttccggtggtttccgtatctaacgagagaattttagatgtaagtaacttttgaataatttcctttcttttctcttctgtatcaatgagttgatagtcacaacagagcgattctaacgtctctagattcgattttttggcttcactcggctcgttgcccgtgaaatttgcaaataaatcgccttgtatcccttcacttttttcgggaaagagtgggagaggagcggaagtctcttttttaagtacccggtcgataagtgttctaaattccagttcctcgaagatggaacgaagcgcctcttcgtccggttgctcgcgaacgagcgcatccatctcaagttggataggtacatcgattttgatagttgccaggaatttagagaatgttatcatctcccggttcgtttccacttttgtctttaatgctcctttcagttggtcggtatgctccaataggttctcgatacttccgaattcggcaatcagtttctgagcggtcttttcgcctatgccgggacagccggggatattatccgaagagtcgcccatcagaccgagcatatcaatcacttgtgccggagacttaatatcgaacttggctttcacttcttccactcccattacctcaaagcctcccgtatgtttgggacggtacatgaataccttgtcacttaccaattgtccgtaatccttatcaggtgtcatcatataagtagtgatgccttgacgaccggcctcggtagcaagtgttcctatcacgtcatcggcttcgtaaccggcaacctccagaataggaatgcgataagcacggataatatcctttataatagggacggataatcggattgcttccggagtttcttcgcgttgtgctttatattgttcgaaagcttcgtggcggaaggtaggccccgaagggtcgaaagccactcctatatgcgtcgggttctcttttttcagcacctcttctagggtattcacaaagcctagtatggctgaagtattgaatcctttggagttgattctggggtttttgataaaggcgtagtatgcacggtatatcagtgcataagcgtctaaaagaaataatttattatctgaatccatagatttaattaatttttcatggtaaaaatacaaaaaaataccgtattaagcgttttattattacttttgtgctcaaattgtgtagtaaatggacagtatatcacttatcagaactccgattgaagcggaactggaggctttcaagaaactttttgatagttctctttccagttcgaatgcattgctcgacagtgtcgtatcccatatacggcagaggaatggtaagatgatgcgtcctattcttgtcttgttggtggcacgtctttacgatgccgtccgtccttctacccttcatgcggctgtttcgctggaactgcttcatacagccagtttggtgcatgacgatgtggtggatgagagtaccgaacgtcgtggtcagctttcagtgaatgccatctttaataataaggtagccgtgttgacgggagattatttgcttgccactagtttggttcacgccgagcaaacgaaaagccatcctatcattcgactggtttctttgctggggcaggatcttgccgacggtgaattgcttcaactttcgaatgtaagtaatcatagtttctcggaatccgtttattttgatgtaatccgtaagaaaaccgctgctctttttgctgcctgcacgaaggctgccgccctctcggtagatgcaaatgaggaagaagccgaattcgcccgtttactaggggagtatattggtatttgcttccagattaaagatgatatttttgactactttgatagtaaggagattggtaagccgacaggtaatgatatgctcgaaggcaagttgaccttaccggctctctatgtgctgaacaatacgaaggacgatgctgcccgggagattgcgatcaaggtgaaagacggtacggctacccctgacgaaatagcccgtttgatcgcgtttatcaaagaaagcggaggtatcgaatatgcaattcaaaccatgaatttgtataaagagaaagctctaggattattggcctctttgccggattcggatgtatgtacagctctccgggcctatctgaattacgtggtggaccgcgaaaaatgattactttcgatatttatccaaccgggaataacaagacaaaaatcgatcccaatcttctatcttttctgatttcatagctttgcctattaggaagcttttatctatttcttccggtgtatggagtacatcagcgcataatgtattggcctgttctatgtatctccaggcttcttcttttgtaatatatccgcttcctaaagcactgcgaaccaatcctacgagcagccccatatcccatccgacaattcctctttccaaatcatttatccatataatagggtctcttctttcctctgtgtacttcacgaaattgtatagattctttccttgccggacaaagcggtctattccgaaaaagcgtttgcgaatgatttcttcgaactcatgtatattgcttgctgaaagcaggtaaggaagcatgatttgataggagaccctatcgccctcattgatcagaaattggaataatccggtgacggcttcggtatcgttacaataaaatttctctaacaacaaatcggataatttttgcgggtgcattccggtttctatggaattaagataaaatccttccaatgcggcttccatatagccgatgcgtaatccctttttcctctcggttttgaggaacaggtttagagggttatgattgaatcgtaaggttctcgtgtatacatccatcctatactttcattcagatttatgaaaagcgtgagaactgttgcaatgtatcctcctgaggcttcggcaagccgttatgataatacaagcaacagtcccacgctccgttcgatatataacaaaagtatatacatgaaggtgcgtgagacccgtttgcttattaccttcataactttgaattttgccgaattccaggaagttggtaataaatgaaacgttctctaatataactggttagctatattttcatcgctaaatcgtttacaaagataaggaatttttgaattgtaggataacgaactttagtttttcttaatataaaaagtgccgcgtcggcttccgtaaaggcgggagccagcgcggcggggcatatttgattgctaatgtagccttagggggttagaagaatttgatttcttcgcctttgatatccgaaaggaggagattggccagacggctggtacccaagcggaacagctggttgttgagccattcctcgcccagtacttccttgacgatggtgtaataaacaactgcgtcgttgaccgtattgatgccccctgccggtttgaagccgactttatttcctgttttctgatagtattccttgatggcttcacacatcacatacgcagcttctggagtggcggcaggctgttgcttgccggtggacgttttgatgaaatccgcacccgaatacatggataggatagaggcttttttgatgttggaagcactcttcaaggctcctgtttcgaggattactttcagatgatgttctttgcatacttccttcaactccactatttcttcgcacattccttcgtagtctccgctcaagaacttgcctatggagatgacgatgtctatttcatcggcaccgtctgtgattgccaatgcagtttctgctacttttacttcgatgaaagtctgagatgaagggaaacctcctgatacacaggcgatattgactccgtctacctccaacgtattcttgacgatagcggcaaaattaggatatacgcagattgccgctacattcttcagatcagggtattcatcgtcaaactgattgactttttcggtgaaatgcattacgctctcatcgctatctgtgctgttcagtgtagtcaggtcgatacagttgaacaggaacttcttaacgtcttccgtattgtttcccggaactttcttctcgatcagttcggctacgcgagcttggatgtccgcatcgttcagattggtgttatactttgccagtgcggcatcatacttgctgggctgtgagttattctcttccatgatctttcagttttgggttgttgatatgtcttttattatctcgtttcgttttcttgtctatactcttttgcaacgcgtcggtgatatctacacccgtttggttggcaatgcagagaagcacccataatacgtctgctatttcttcatcaaggttgtctttttctccctctttgaaggattggtcgccatattttcgagccataacccgtgccagttctccgacttcttcggtcaggactgccatgttggtcaactcgctaaagtagcggacgccgtatgtcttcacccattggtctacttgtttttgagcttcttccagagtcatttctttagtgcttaggggttaataattgtgattaatagggttgttactgatggttagtcagtctgttattctttgttcttggtatctatacatatagtaacagggccgtcgtttaaaagttcgactttcatatccgccccgaaagtacctgtaccgattgccttgcccaatgcgctgctcagatctttgcagaactgctcgtaaagcggaatggatacatccggctttgcggctttgatgtaggaggggcggtttcctttcttggtggaagcgtgtaaagtgaactggctgatgaccagaatctcgcctccgtcttccagaatagacttattcattactccattttcatcgtcgaaaatacgcagatttactatctttttgcagagccagtcaatgtcctcctgaccgtcggcttcctcgataccgactaaaatcagcattccttttccgatggcagacttgcagtttccgtcaatagtgactgatgcatggcttacccgttgtataacaattcgcattactcttcttttatttcatgattatgaaaggcaaatttacaaaattaagaagagaaaacggtgtattgggaagaaaatattataatccttctttgactatttttgctttggcttctccgacaacggcggcaatatcctctaatgaggcctctttgattcgttttacgctcttgaactcttttagaagagccgttttggtcttttctccaatccctttgatggtatccagcgcagatgccacttgccgtttgctgcgtttatcgcgatggaaactgattgcaaagcggtgtacttcatcctgaatctgtgtcagtagacggaagagcgggctatgctgcttgataccgattgtttgcggtggaaagccgaataggagttccgatgtacggtggcggttgtcttttgccagtccggcaataggaatattgagacgtaattcatcctcaataacttctctgacgacctccatttgcccttttccaccatcagtgatgatcaggtcgggtagaggagcgttttcttcaatagcacgctgataacgccttctgacgacttctttcatcgaagcgtagtcatccgggcctacgacggtctttatattatattttcggtaatcctttttcgatggtttggcttttttaaatacgacgcaggctgccactgcgtcagaaccttgtatgttcgagttatcgaaacattcaatctgcaatggaggcctttccaaatgcaattcttgttgtatctctttcatcaaacgcatgctcctctgctccggattcagcttttccgcctgtttcaggcggtcggccttgtattgcttcacgtttaagatggaaagttccaatagctttttcttatctccccgttggggaacggtgaaaacgacattattcagctccatatcaagctcaaaaggaacgataatctctctcgactgactcttgtaacgctctcgcatctcgataatgcccagcgtcagaagttcttcttttgattcattcagcttcttcttatattcgaaagtgaaagcctggttgatagctccgttggtgatatggaggtaattgatgaaggctgaattggtttcatcttcttcgatagaaaagacatctatattatgaaggacagagctgaccacttccgacttcgaacgatagttttctattaaaagatacttctcttttattttctgtgcctcctcaaacttcatctcacctgccaatgtctgcattttctccagcagcatacggcttacttcttgcgtatttcccttgagaatctctttgatttcatcgatattcttgaggtagtcttcctgtgattgcagcccgatgcatggtccggcgcatttcttgatatgatattccaggcaaacattgaatttgcctgcccgaatgttctccgggcttaaatttaaattgcaagtccgcaaaggatatagatgctttattaagtccaataccgcatacatcgagggaatatggctatacggaccataataggaagaaccgtttcttattatctttctcgttttgaaaactcggggaaaatactcgttttgtacgcaaatagaaggataagtcttgtcatccttcaataaaacgttgtaacggggtttgtatttctttatcagattattttccagaaggagagcgtcctcttccgtgttgactacaatgtagcgaatatccacgattttgctgaccaacacccgtgtctttccgggttcgtgttctttactgaaataggagtagacccttttctttaaatttttagcctttccaacgtatataatcgttccttccgaattcaggtattgataaatacccggcttttcgggaagattggctacgattcctttcagatattcattgaacttcgcttccatacgtatacttattctcattctttgggtttcatcacacagaggacgcggagtattatagcgtcagtacggattctacctctacatcatcgccgaatacggctttcccgttcaggtctttcaactcgatgatgaagtttacatatacttttttaggctttagcattttcacaagttcacaagcagctttcattgttcctcctgttgccagcaggtcatcgtgtatcagaactacatcgttctcgtccagcgcatctttatgaatctgcacggtatcttttccgtattccttgtcataacttgcctcaagtgtttcggccggaagcttgcctggtttgcggatagggacaaatccggcattcaggcgggttgctaaaataggccccatgatgaaacctcttgattctatgcctataacttttgtgatacctttgtccttatacatatcgaacatgacatccgacaattcctgcaaacaccacgggtctttgaataatgtcgtaacatcataaaacaagattccgggaatggggaaatctggtatttcccgaatacttttgattagcgtttctttgctcataatcattgatttatatcgtttctttaaatgttttgtttcacgtgaaacgttgcgcattatcatcgtcccgaaagcaccagtaatacattgatgtcgcttggagatactcccggtattctgcttgcttgggcaattgtttccggatctatctttaccagcttttggcgggcttcggtagatagcgactgaatggaagcataatcaaacttccctttaatttttatactttccaatcgtgccagcttttctgctatcatccgttctctgtcaatgtatccttgatacttgattaagatttcagcagcttcgagaatttcttcttttcggccttcatcggaacttgtcgctttttccaattcccgttggaatgccggaatatgctctgatatgttttcaatcgtcacttgcggacgattcagtatttctatcaacttgcatccttgacgcaggggagtggttcctatcttttcgagtgcatcattgattaatgcaggtttcatcgaatagttttgtgcgaaggaaacgatttgctccactgcttcctttttgcttttcattaattgataacgatcttctttggccaggccaagctgataggctctttcggtgagtcgcatatctgcgtcatccattcggagcaagatccgatattctgcccgtgaggtgaacatccgataaggttcatctacaccttttgttaccagatcatcgatcaatacgcctatatatgcttcgtcacgtgctaatgtgaatgcttcgccaccatgacaattgatatgtgcgttgattccggctattaatccttgtcctccggcttcttcatatccggtagtaccattcacctgtccggcaaagaataaatttttgataatcttcgattccaacgtatgtttcaattgtgtcgggtcgaagtagtcatattcgatggcatatcccggacggtagatcactaaatctttgaatgccggaatttgttttagcgctgcgatctgtatatccatcggaagcgaggaagaaaatccgttcaagtataattcttgggtggtttcaccttccggttccaggaacaactgatgctggttcttgtcggggaaagtaacgatcttggtttcgatactcggacaataacgtggaccgatactctgaatctgtccgttgaatagaggggaatccggcagaccttcgcgtagaatgcgatgtacttcctcattcgtatagcaggtccagcattgaagttgtttcaaatgccgcacgcttgtgttcataaatgaaaacttatggaagtcacattctccatcctgtgtttccatctgatcaaaatgaacgctgcgtgcatctattcgtaccggagttccggttttcattctaccgtatgtgatcccgtgacgggcgatggattcggtcagttggtaagaagccggttcggacattcttcctcccggcaacttatgacgtccgacgtgcataagtccgttgaggaaagttcctgcggttagtacgacacacttcgctttgaaggtaactccccaaactgtaacaaggccggtcacctctccgttctccaccagaagttcgcagacggtatcttgccagatgtgaagattgggtgtgttctccagtttttcccgccaggaccagataaacttggcgcggtcacattgagcgcgcggactccacatggcaggaccttttgaccggtttaagattcggaattggatggccgtctcgtccgtaaccaatcccatctgtccacccagtgcatctatttcacgtacaatttgtcctttggcgattcctcctactgccgggttgcaactcatctgtccaatcttgttcatgtccattgtgatgagacaagtctttgaacctaaattagcggcagcggctgccgcttcgcaaccggcatgtccggcaccaattacaattacgtcgtacttaaaatccattcctatcttatttattatctaacgctgcaaagttacagaaaagttgcgagagttgtatctttaagctgtttttgcttccgaaaaatcggggagagggatgggcggattgaaaaaaacgccgtgatttcgggttatgaacatacagtttgttcaaaaaataaagttgtttttgctgctttggtggtttactttctactaaaaagtaagaattttgcctctatatgttctcgtatgctttctttttgctacttcgggaattactagaattttgaagaaactagactcgtctttcacccgaactcttgacataagtcaaaaaaataagttcaaatatattttttaataaaatgtctcttgtcattttccaaaacagctatacctttgcatcgtagttgtgaaactacttagatttttaggtattagaaaaagaaaaattaaaaggtaaaaattagaaggtattagtttataaatttaaggtattagattttttagattgtttttaggaaaaaggttgttttgattaggtattggtaaaagagtagtttttaggtaacaagtaaatgaaagatgaagaaaagaagaatcccattaatggggattctttaaggtggagcggaatgattcgctctttttttatgcccgtttgtgtcattagcagtactatttcatagatgaatactctgtagtcttatcctggattggcgctcttttcagattataaaagcgacattccattcgttccactctagtggatagaaccgttcactagagtagacggaactgttcactagagtacaatgatctgttcactggagtgcaacggtttggatgcgcgatagataatgcggggaatatggcttgataaagcgcttttgaatgcttccttgcatataaatgtctgttggttgtgggctgaagtactgttggataaagaaaaaaagaagcttgtgtttgtcatgagaggaaagagtatgagagattctgtaaaagatatgagagatctcgtgaaaagtatgagagatgcggaactttaaaatcatctctcattatataatcgtctgatcataggttgtttgccttccttttatgagagatatgagagatgaaaatgaaaaatcagttttagtatgcctgcttttattttctattttgtatcattgctgtcccattaaaatctaaaatagttctttgaaatatttgaaatttagttagttacagaggtttttcgagcgaacggacttgaattcgtagctttgtatcagattaatctgatagcatatgttccaagacaaatacgtttttgctcagttggcttcgtttctgaatcgaagtaagtttaaccgcattgttgccaagtatgatggcgacaaatatgtgaagcatttcacctgctggaatcaactacttgctttgatgttcggtcaactttctaatcgtgaaagtctgcgagatttaatagttgcgcttgaagcccatcattccaaatgttatcatttaggaatgggtaaaaacgtatcaaagtcatcgctggcacgagcaaatcaagatagggactatcatatctttgaagaatacgcttactacctagttagcgaagcacgagaaaagcgtgttactcatattttcaaacttggtggcaacgtttatgctttcgattcgacaactattgacctgtgcctttcagtcttttggtgggctaaattccgcaagaagaaaggtggtatcaaagtgcatacattatatgatatagaaacacagatacctgcattctttcatatcacggaagcatccgtacacgattctaaagtaatgaatgagattccttatgaaccaggctcttattacatctttgaccgcggttataacaacttcaagatgctgtataagattcatcagattgaagcctacttcgttgtcagagcaaaaaagaaccttcaatacaaatccatcaaatggaaacgtaggctgcctaagaatgtgttttcagacgcgagcatacttctaactggattctatcctaaacaatattatccggagccacttagactggttaaatattgggatgaagaacaagaacgagaatttacattcataaccaatgccatgcatatatctgcacttcaagttgctgaactttataaaaatcgttggcaggtagagctgtttttcaagtggctaaagcagcaccttaaaatcaaaagattttgggggactacagagaatgctgttcgaatacagatatatgctgcaatatgcacttactgtttggtggcaatcattcaacacgatatgcaactggatagaagtacatacgaagtgctacaaatattgagcatctcattgactgataaaactcatctgagagacctctttgataaaactaaatttcaaaatgacaaagaacgattcggaccaaatgggccaagtttatttaatttttaattcgtcccaattttaatgggacactagtgaaatacaatataaaaagaaaaagcgcatattcttgcaactgaatatgcactttttcttctattaggtccttttatcttattccggttttcttctggatcttaaaaacagaacagatctacttcaactacctttcatataatctttcggtaatactccaaattgtttttgaaaacaacgggcaaaataagaatgattgctaaaacctaccagataacaaacttcattcactcgatatttcccttctttcaagaactgtgcggccgacttcaatcgaacaagccgtatgtaatcaataggaggaagtcccgtaactcccttcaatttgcgttgtaaattagaacgactcaaagccatttctgaagcaagtgtgtcgaccgtaaaactttcattcgtaaaattgcggataataatttcattaacctgctcaagccactcaaaatcagaacgtttaatttctccctgaccatactccaaattagacatactggcaaaacgttcaaacaaaacctttctgtttttcaaaagattatctattgttgccttgatatggcttaaagaaaaaggcttctcaatataggcgtctgctccgtaatccaatcctgttatctttgagttaaccgagctttgtgctgataacaatataaatggaatatgacacaacatcttatccgcacgaaccgcattcagcaattcaaaaccatccatctcgggcattacaatatcgctaataatgatatcaatagtgttattatgtaatatttttaatgcttcttttccatttattgctcccaaaacattgtaattataccctagattcttcagtaagaactccagcatatcatgcgtgtcctctacgataagaagattacactcgtatatttcaaaatgcccataaaattcatgttcattccggttaccggccaacttagttacagtgacctctgttttaggtaaatatatcgtaagcaggaacccgccttggctacttttaccaacagatattttacctccatgcttatctaccagcaattttacaagactcaaccctatcccaaaacctgtttctgacgaactgttatttccggaacgatagaatggctcaaaaatcttagcggcttcggtttccgtcactcccggaccatcatcaccgacagaaatctcaagcattacagcaccttccacaacggcttcaccagcagaaacccaaatttcattacgcgcatatttgaaagcattggtcagcaaattactgactatttttgtcagagcttcagcatccacattgtatatcagatgctcttgtgcaaacttcgtctgaatagtaacagatgatgaaaacgaggtaaatctcctgatgatatctttcatgaaagaattaatgtccacctcgctatatgacaatttataaccttcttgatccactttacggaaattcaacaactgcttaatcaattcgagtaaccgatttgtattttgccggatgatagaaagattagcttcagtctcctcactccacgcaccagattcaaaaatggcctccaacggagcctttatcaaactaacaggagtttttatctcatgtgcaacgtgagtaaaaaactgaattttagatcgatacatctcctgctccatcatcagttccatatcctttttctcacgttcacgcctttcactttgctttttagagtatctaaacagaagcaaacaagcagaaaataagagtaaaaaggtataaacgattttagctgatgtcgttttccaaaaaggagcctctatatgcaggtttatgaaacaaggattatcactccacaccccatcattatttgctaccttcaccataaatttatatgtacctgaaggtagatccatgaaagtcaccgagtgtttatccgtataaacccagtcatcatgcacttggtctattctataggcataacagttctttgaaggagctacaaaacttagacattcatatcctatctcaaaagaagaaatatgataatcaacggtaaattcactttgcctactgatatttatcttatgcgtttctgcactcccactactatcatgcaaattaatagaagaaattaccgcagtgggcttgaccgtatttgtatatagtttatccggataaaaacaattaaatccttccactcctccaaaataaaacagtccattactggcttttagagatgaacgaaaattaaataaattactctgcaaaccatcttcatgagtatatagcttcgactcttctgtgagtggattatactttatgattccatagttggatgacaaccataaattaccatctttatcatccaatatcccatatataacatggttatacagcttctttcgataattataattcacaaaagaatcggaatcataatcatagcgggatatccctcctccttccgtacaaaaccacaattgcccgatacgatctatataaacccgaactacccgattattactcaaagaacctgaatcggaaaccgaatgcttgtaattcttgaatttccctgttccacggtcataacgccatattccgtctcctttggtagcaatccatagtacaccggcactatcctccaacatatcataaataaacacatccttcaacttatcaaaacggtgaaatttgtttatttccggtaaaaactgacaaaaccctcccattgtaccgacaaagatttctccgtgcctgtttttatataaagaataaatatgattatgaggaatggaattagaatcattcatattatactgatagtttttcactacggaacgcgttttcagattcatgatgtcaatgccttgggagaaagttcctatccataactgatgatcgtccaataataaagcatgtatattattatggctgacattcgtagaagaaccatttgccatataacgtgtaaactcttcagtacgcggattaaagtagttcagacctccattctccgtagcaatccataagtttccatcaggatcttcactaaactggctaaccgcatttccggataatgaattctgtttatgcttttcataataccatttgatataattactttgcggtgatatataatataccccatcgaaataagtacccacccatactccaccttcacgatcacgactgaatgaataaatacactttgaaccgaacgcctccaatttatgaagagttttctctttctggcgaaataggaataacccatcttctgttcctataaaaaatacattcgggctatattggaaaagagcccggatccaagtattgctttgataagtcgctaccacaggataagcggtaaaagtgccatccgatctgtccagatgtaatagtccgtcatatctggtacctatccaaatttcaccatcagctgtttccatcaaagtgtttatttcaaacgggtgagaaacttttgtaagacgaggcagacgatatactgcaaaattatccgaagcttttttatatctcgccaatccctgacgagtcccaaaccatagggttcccgaagaatctttaaacactgaaatgacttgattatcaggaatagaagttggctctacctgtgatttcacatatctccgtagctgccctttcctttcatcatatacaaataatcctctcgaagtaccaatccataaccgtccgtcatcatcataacataaatcattcacagtccccacaataccaactccctgatccgttttctcaccaaatagcatgaaatctttagattgagtattgaaaagataaagtccgtctgtagtggctgtccaaatattgacccgatcgatatgtggataaagcttcaatacattaattaatgtattatttgatgaatctacggtatcagcaaatttagtaaactcaattccattaaagcagtttacaccatctttcgttcccaaccatatatatccggttgaatcctgcatgatagtgcgtaccgtattatcagacaatccggttttaacatcatattttctcataacagaaaaagtctgaccacaaagaaagtcagcctgtgcaatcgtaatgaccagcaccaatatacgaagtaaatgattcatcgtgcaacatttttgatatacgcaaatatagaatttattttcattcgtcaccgcccgtcacaggaatatgactaattcagagccttatttgactaacttgagctattttcatgttttagccctttcacttcattgctaaaattggtattattttcctcatccgggctattgatattgcaatataccatctatttttgcagtatccatcatttagttctctgatattttctaatagaccagctatgctctttattatatgtccggacaagttatttgacgtatagcgattaaaccgaaaatatccagagtattattgaaaggaatatttctaattaaaaaccatttgtcctatatgtattatatgaaaaaacacattctatttatggctatatttgctttacattgtctgacaatgtctgcccagcaaataaaaatctcgggaaaggtcaccgacgaaagtaactatcctttgcccggagctaccgtttccattttggaatcgggcaatggaacctctacaaacctggaaggagagtactccattcaagtcatgccgggaaccaaacttcaattcagttatatcggctatgtatcccaaacaatacttgtggataataaaacgatcataaatgtaactctacttcctaaatcagaatcacttgaagaggtagttgtagtaggatatggcgttcagaaaaaggcgaacctaacaggttctgtatcaactgtaaacttcgatcaggaaatgtcaagccgccccatagctaatgcttctagtgcaatggcaggactttcagcaggtgtccaagtgcaacaaagttccgggaaacccggttcaaatggagcaaccatcaggattcgcggtaccggaacattgaactctaataatccattagtacttgtagatggtatcgaatgggatatgaataatgtgaatacagaagatattgccagtatcactgtactgaaagatgcagcttcggcagcaatctatggttcacgtgcagccaatggagtgattcttgtaactaccaagaaaggacagggaaaagccaaagtaagctattcgttctgtggctctatagagactcctcaaaacaaactttcattagtcagtgactatgccagacatatggagcttatcaatgagggtacagaaaatgtagggaaagctcatatttttgaacaatcgaccatagataaatggcgtgaagccaaaaataatcccaatgggactaatgaatttgggatgcctaattacatggcctatcctaatacagactggtttaatgaaattatgggatcgggattctcacaaaaacacaatttatctatttcaggaagtaatgacaaggttaactactttttatctttaggatatcaagatatagatggagtcatgaatcaaaaaggaacagactccggattccagcagttccaattccgaacgaacatcgaaataaaaattaataaatggctttccgttggtacccgtctcaacggattaaaacaagatataggccttgccaatatcagccgtggatttgaatatctttataaaacaactcccggagtctatccaggagaaaacgacaaatgggggctatctgtggcaacagaagaatccactaacgccaataatatacttgagaaaatgagacgctggggatatgataaaatgtttcgcggaaatttcacactcttcggcagtattcgcccaatgaaagggttatccatcgaagcaagctataactacgctcctgactggggagattacgccacatggggagctccgaacggcacatgggattacgtaaaaaacatacgtattaatgaaagtgccttagaaaatgcaagcattaataataaatcatttaaaagacgcagagagaactccgaaattctgatacgctataacacaactgttgcccacgatcatgaaataagcgcactgggtggattcacgacttcctactataacgagaattattttgacgtaacacgaaaaggtatgtcggattggagtctgactcaacttaaaacagcaacagaactcgtttccagtgacagtaatgaaacagactgggctctgatttcttatttcggacgtcttaattacgccttcaaagggcgctacctgtttgaagcaaatgtccgttacgatggttcgtcgcggttcgccccggaaagtcgttggggagttttcccatctttctctgccggttggagaataaatgaagaaaaattcatgagttttgcacaagattatctttctaatttaaagattcgtgcctcttggggaaaacttggaaataacgcatcgggaaactatgactggcaagccaattatagtactaataaagtagttatcgactcttcacctaccacaggactggctatcagtaaacttggaaatagttttcttgaatgggaatctacaactaccaccaatgttggaatcgatctgggcttcttcaacaacagactgacgggagaattcgactggtataataaaatgaccacgggaatactattcactccatccattcccctatctatgggtaaggtcaccggttccacagaaaatatagcagaagtacgtaaccgcggtgtagaattgactttaggatggcaagataatattaaagactttacataccgtatagaaggtaacttctcttacaaccaaaacaaggtaatgaaatataaaggagaacttgccaaatactgggaatatgataatgccggaaaccctacgagattcgtcagcaattacggggatgtagcacaaagtggctttgggggtgtcatcgttgaaaatagaatgttaggagaaatgtatttgagacaactttatcgtggcaatggttcatactccggaggaaaacctgacatcaatgccggaccagtcgacggtatgattcgtacagaatctgatatggcctgggtaaaagccatgatagcggatggatataaatttaatggagtaaccaaagtagcaaaagatcaattatggtatggtgacttgatttatgcagatgctaacggagacggcaattatggtgataccaatgatatgaactttaccggaacctctacccagccccgttataactttggcctcaatctttcagcgacctacaaaggttttgatttctatatgctatgggctggtagtgcaggattcgatctttattggaaccattcctcctataatggtactcgaactgaaaatggatttggaatcagccaacgcgtagcggacaatcattacttttatgatccggaaaatccatctgactccagaacaaatataactgcagaatatccacgaatcacagaccagacacagcgtgataatggtaccagtagtgtattttggaaatataaaggtgattatgtcaaactaaagaacattcagataggatatacaattcccgtgaaatggaccagaaaattcatggtagagaaactacgtttttatttttccggagaaaatctgttaaccataacgagctatccgggactcgatccagaaatgggtacttcaataacttatccattaaccagacagtttgcattcggtgcacagttatcattttaattcatcattactcatataacaaataaatgaattatgaaaaaaattattatattctgcctgacaatctgtagcatccttcagggatgtacctatatgctcgacacaactccgtacgatcaaatagccacgggtaacatgtggacaagtgaagagctggcagacaaaggagttgccggtatttatgacgtactatacaacaggagtctcctagtccttaatcctgaaaagtcggaagtaacaggtatcaataaactgggaatagaatcgatgggattctgctccggctactattcaggcatcgccctgctaacttcaaccgccccaagtgccggatatgcctatatttcacgtgagtggcaatttggctatgaaggaatccatcgatgcaacgatgctattgccaacttacataaagccggactttcagaggaaaagctggagcgcctaatgtgtgaatccaaatttatgcgagctttcttttattaccggctaaatatgttctttcagggagtacccatctatttggaacccattaacagtagtgaagccacacggggaaaatcttccgctgacgatgtctggaaagtttgtttggatgaccttaccgcatgtattcaaagcccgcatttaggtaataacacactgaaagaaaattatggaagaccttccaaaggagcggcttatgctttaagagggatggtatatatgtggaagaaagaatatgattcagctattaaagattttgaagaagttaaaaagtgcggttatgatttatgggaaggaaaatatattgacttctttaagtatgagaatgaaaaagataaagaaatgatactcccgttacaatatgatgaagctagcggatattgcgacaatattcagctgatggtcggctcacgcgaccactatgattgctggacggaattaatcccatcagccgattttgtagattactatcgtaatgccgatggatccgaattcaaatggagtgcttatctaaccgggtgggatgaccttacccccgctcaaagagaagtttttttcctacgcaataatctaacttccaatcagagtgcttataatgatgccaaatcacgaataggagccgaagtgatgaataaatattatctcacctccggaaatgaagcacgtatcaaaaaagcatatgaatcacgtgacccacgattacaacagaccatcatcactccttattcaagcaccaattgttacagcccatactggaatagtggagaacccatgcagaataaggttcttagatggccttatctggatcgtggaggcaataatggagatatgtggcacaatcaaagaaatgcagggtattacatttataaaaagtacaatgaaacagagaaaggccgttacatagaacgactgcgctgtcattgtgattatccgctaattcgtttcactgatgtatggctactttacgctgaagcacttaatgagaaagatagattagatgaagcaattatagcagtcaataaaatccgtaaacgtgcaggtatgggagatttagaaaaagggggtacagggtataattctgtctccggtaaagaagatatgagagaaagaatccgttatgaacgacgagtagaattatgtcttgaaagtatcaattatttcgatgaaatcagatggggtacctataaagagaccaagtttcaaggtgattacagcggtttaaaagcatggtggggaaatatcgttggaagtaaatggtattggaaagattacatgacggtatggcctattccactagtagaaacccaaagaaatccaaatctcaaacctacagaaggatggacgtattaaacaaaagcaaaatgaagcaactattaataatcatattcatacttattgcgggaggagcaaaaggctatacgaaagatttcgactatagccatattactccacatccccgcctattactcaaggaaggtgaagagagaaatattcatatggttttgcaaaaaaataccgttttacaagcattccacaagcgaatattagactactgtgatgaaactcttaaagagcctccggttaaaagaatcaaagaaggcaaacggcttctgggagtttcgcgcattgttctcaaaagagtcttctacctgtcatatgcttatcgtatgacaagtgaagagaaatacctccggcgagccgaaaaagaaatgctggctgcagcttctttcaccgattggaatcccagccatttcctggatgtaagcgaaatgagtatgggactagccattggatacgactggctattcaatgaactgttaccggacagccggaagaaaatccgacaggccattgtagaaaaagcaatagaagcctccaaaacaaaacatgctagtttctacaaatcaagaacaaactggaatcaggtttgtaacggaggacttgtatgtagtgcacttgctatctatgaagatgaaccagagaaaactaaagagatcattaacaaggcacttcaaacagtacctctagctttagaatgttatgctcccgatggcggttaccccgaaggatttggctattggtcttacggtacttcataccaagtgatgcttaatgatgcattagaaagttccttgggtcatgatgccggactaagcgattaccccggttttctacaatcagcccaatacattcaatatatgacagctccaacaggagattgtttcaacttctctgatgccagtcctaaagcgtatggaaatatcatgatgttctggtttgcccataaaactaaaaatccatcgctactttggcttgaaaagaagtatctgaatgatgcaaacctggaatttggtgaatacctcgaagaaaggttcctgccatgtttactcatctttgcctcacgcatcgacttagacgaagtaaccagtcctaaaggtaacacatggcatagtagaggtaaaaaccccgtttatatttatcgaagcgggtggaactctaaaacggacacctatctgggagtaaaaggcggaacggcttctacctcacacgcacatatggatgccggatcattcatttatgaacaagcaggggtcagatgggccatggatttggggatgcaggattattacagtcttgaaagtaaaggggtagacttgtgggatacaaagcagtattctcaaagatggcaagtattccgaataggaagcagtgcacataacactcttactatcgatggaaaaaaccatcaggtgaatggctttgccgagttaacaagtctcactgataatcaagggaacaaaggagcaaagattaatttgacttcaatattaggacaacctatcaatcaggcaacacgtactgtggttctcacccctgacaattcattggaaataacggattatattgaaaacaaagataccgtctctctaattcgatggacaatgtgtacccctactattcctaaaataacggataaccaaactatcgtgttaacccaaggaaacaaacagctttcactacaagttgactctccgcgaaaagtgaatctgcatatttgggataatactccacctcatgactacgattatggaaatccgggtacgtatagagtgggatatgacattgccctaaatcccaaagaaaaagttacaatcaaagtaaaattcaaccttattaaaaatgaatagacacatgaaaaaaatattattatgtatgcttctattatggggagctatattcactttcggaagttgtgacgtagatattccagaaattgaaaaacctgttttaccagagaaagactcttcttcgcaaccggatgatgaggatgatccttcagctgatcccagcggcatattcgactattcaaaaataggagagcatccacggctattcttaaacgcccaagactttgatcgcttgaaacaggaaattacaaataactccatacttaaaaacattcatgagatcatcataaacagatgtaacaaagaatttgtcggagcctctactctcacttatcaaaagaatggcaaacgacttctgactgtttcacgtaaagcactggaacgaatttgccatctggcatacggatatagaatgaatggcgattatacttatctgaatcaggcagagaaagatatccgctcggtatgttcattccccgactggaatccaactcattatctggatataggagaaatggctttagccgttgcaatcggattagactggctatataatgatcttcaacctgaaaccagacaaatggctcaaacagcacttgagaactacgcatttaaaactgctattgatcccacttattcgggacaatttattgaagcaactacaaattggaaccaggtatgcaatgggggattactagccgccgcactcgttacttacgaaaaggataaaagtcgtgctgttgaaatcatagaacaaagctttaacagtaacaaaaacaaaggcatgactacatacggcactgacgggaattaccccgaaggatatatgtattggggatatggaacgacttatcaagtaatattaatcgctgcactggagaaggtattcaacacagataacggattatcgcaaacaactgccggatttttgaaaaccgcagaatatatgttattcatggccggaacaacaggaaaatgttttaattactccgattgtaccgaacccgaagaacctaaactaccgatgtggtggtttgctaaaaaacaggaaaacagctcgttattattcaatgaactcaggttactgaaaaaaggagcatatgccagcaaattcgaagaacgccgcttattgcctattatcatgggattcattaatcccgagcaagtaaaagaaactatttctgccccacaaaaaaagttgtggtggggagacggagatactccggtagtactcattcatacagactggacttactcagacactgataaatatttcggtatgaaaggaggccgctcaaacacaagtcatggtcatatggatggcgcaacattcgtatacgatgcctatggagaacgttgggcaatggatttaggcatgcaagaatatgctcctctcgaagctgcgggtatagatctttggaacagcagccaaagttctacaagatggagtatattccgtctcaataacttcagtcacaatgtaattaccattaataacaatcaatatcattatcaaggaaaagcttttgtgcgaacagattatatgaaaaatatcgggactaagcttggtgccaaattcgagtgctatggagtaaacagaaatggaagcgattacgatgtcgatgctcctgtacgcaccgccgaattcattgataatggaggcgatttggaactggttatgaaagatgaaattaaaagccgtgcaaacaaaactcctctggtgcgttgggccatggctacacctgcaacaacagaaataatttcaaaccaatgtatcaaattatcacagaatggaaaaatcctgtatctgaccgtacaagaacagaacaatcacccgtttactctgaaaacatggccagcctctacagacaataaatatgatgaagccaatccaggggtgacaatggtaggatttgaagcacaaatgagtgcgaaagatacaagagtatttactactacatttgctaaagaaccaaagaatattaattaaaaatacaatcaaaaaacaatgagaagaataaccatcttattgactctgttattaacagtcatatatacgaatgcccaaacagaaaaaagcatccgacaaataacacaggaagtcatggaacgagcttctactcaatatatcaacatggcttccacactggagaaaggtaaaatgcctcgcagtttttcaaaaaacaggctcatcacttcagacatctattggtggtgtagcggtttttatccaggcacattgtggtatctttatgagtatactggttctgaaaatataaagaaacttgcccatacctatacggaaaaacttgctccactgcaattcctcaaaacggatcatgacatcggtttccagctattctgcagttatggtaatggatatagactgacaggcaacaaagaatatttgaatattcttcataatggtgctatgtcattagcaacaagattcaatcctgtcatcggttctatccgtagctgggattcctctcgcgataagtggaaattcccggttatcatagacaatatgatgaaccttgaactgctcatatggataggcaatcagtataatgacccttatttaaaaactgttgccattacacatgcaaacacaacaatgaagaatcattttcgcccggattacagtacttaccatcttgtcgactatgatcctgaaaacgggaaaataataaagaagcaaaccgtacaaggatataatgataactccaaatgggcacgcggacaagcatgggcactttatggattcacaatgatgtaccgaaccactcattcatcacgttatctcgaacaagcacaatccattgcagatatgctcattccgcttctcccttcagatggcatcccttattgggattttgattctccggatatccccaatgatttgagagacgcatcagcaggagccatcatggcttcagcactagtagaactaagtgaatatctaccagaaaagaagatccattatcagagtatagcagagcgccagctccgcacattatcttcccctgaatatctggcagcttccaacactaatggaaattttattctcaaacacagtgtcggacataagccgatgaaaggagaagtagatgttccgcttacttatgctgattattattttatcgaagcattaataagaatgaataatcttgaaaaacaagaataagaaaattcattatcgaatttatattataagttacaacctatttttaacagaaaatgaataaacaattttattccattaaaaaaataggttgtaattttgtctcatacacacttttattaaatatcttgtaataaataatagtatgaaaagacattttttaattctcgttttctctcttttattcttcccaatcactcaaggtaaggtaaaactctctgcaatgatggggaatcacatggtacttcaacaaaatagttccgttaaattatggggttgggcagacggcaaaaaagtaaccgtcactacttcgtggaacaaccggacttatcaggtatctaccggcaaagatggggcctggctggtgaaagtagacactcccaaaggaggttatacaccttattctattacaatcagcgacggagctccggtcactctctcggatatactgataggggaggtatggatctgttccggacagtcgaacatggaaatgcgcatgatgggaaatgccgcacagcccattgacaactcacttgaagtgcttctgaactcaggaaattaccgcgaccgtattcgttttattaccgtaccgagaaccaatgatacagaacgccgcacggattttgaaaaaagaaaatgggaagtatcatcacctgaaacgaccattgattgcagtgccgccgcctatttctttgccagacaacttactgaaagtcttcatcttccggtagggctggttatcaacagttggggaggttcggctatcgaagcatggatggatgaaccaacattgaaaaccattgaaggtataaacatagaagccgccaaaaatcccaaaaggggagtacatcagcgtttggaatgtctgtacaactcgatgttatggcctgttaagaacttcacggcacgggggttcctctggtatcagggagaatcaaatatatccaattatcaattctatgctccgatgatgactgctatggtgcagctatggagaaacgtatgggaagctcccgatatgcctttctattatgtacaaatcgctcctcacaaatacaaagacagccgtgatacaggcgctgccctgttgcgtgaagcgcaggtagaagcactgaaaacaatccctaattcaggtattgttcccactacggatatcggtgatgagttctgtatccatccgtcgcagaaagatgtggtaggactccggctggctacgcttgcgttgactaaaacatacggtattggtcgattgccatccaacggtccgatgatgacaaaagtagactatgagggcaacaaggccatagtgacattcaataacgcacctgccggactgttccctactttcgcccaactggaaggatttgagattgcaggagccgacaagaagttctacccggcgaaagcgaaaattgtaggacgtactaatacagtagaagtatcgagtgaagaagttgtccaaccggttgctgtgcgttatgctttccgtaattatgtaggaaatatcactctgcgcaacactttcggattaagcgcttttccgttccgcacagatacatgggatgacgtgaaataaatggcctctacaaagaatataatcatcggtttactgaggatatagctccaccacgttggatatatagattcagcaagtaagtgatataccctcttcaaagtgttatctataaagaacgcttttctcaaaaaacgtgttttatagataacacttaccttcactagtgtcccattaaaattgggacgaattaaaaattaaataaacttggcccatttggtccgaatcgttctttgtcattttgaaatttagttttatcaaagaggtctctcagatgagttttatcagtcaatgagatgctcaatatttgtagcacttcgtatgtacttctatccagttgcatatcgtgttgaatgattgccaccaaacagtaagtgcatattgcagcatatatctgtattcgaacagcattctctgtagtcccccaaaatcttttgattttaaggtgctgctttagccacttgaaaaacagctctacctgccaacgatttttataaagttcagcaacttgaagtgcagatatatgcatggcattggttatgaatgtaaattctcgttcttgttcttcatcccaatatttaaccagtctaagtggctccggataatattgtttaggatagaatccagttagaagtatgctcgcgtctgaaaacacattcttaggcagcctacgtttccatttgatggatttgtattgaaggttcttttttgctctgacaacgaagtaggcttcaatctgatgaatcttatacagcatcttgaagttgttataaccgcggtcaaagatgtaataagagcctggttcataaggaatctcattcattactttagaatcgtgtacggatgcttccgtgatatgaaagaatgcaggtatctgtgtttctatatcatataatgtatgcactttgataccacctttcttcttgcggaatttagcccaccaaaagactgaaaggcacaggtcaatagttgtcgaatcgaaagcataaacgttgccaccaagtttgaaaatatgagtaacacgcttttctcgtgcttcgctaactaggtagtaagcgtattcttcaaagatatgatagtccctatcttgatttgctcgtgccagcgatgactttgatacgtttttacccattcctaaatgataacatttggaatgatgggcttcaagcgcaactattaaatctcgcagactttcacgattagaaagttgaccgaacatcaaagcaagtagttgattccagcaggtgaaatgcttcacatatttgtcgccatcatacttggcaacaatgcggttaaacttacttcgattcagaaacgaagccaactgagcaaaaacgtatttgtcttggaacatatgctatcagattaatctgatacaaagctacgaattcaagtccgttcgctcgaaaaacctctgtaactaactaaatttcaaatatttcaaagaactattttagattttaatgggacagcaatgattttgtagcttggttaagcctgcgtttctgaaaaaaacaatatatttgcattcgtaaatatcgcaaaagtaagtagttacagcgtttttgatgaattctgttttcttttttcgcaggtaatgtgacagtatgaaggataaaattgacgccatagtagcgggagtcaaccgaaaggatgaaaagatatggggcgatttctatgatcgtttttatgccgctctatgtgtgtatgtttccaagatattgccggtgcccgatgcggtggaagatttggttcaggaggtttttatttctatctgggaaggtaagcgtactttctctgatatcaaggaactcgccaattatctttatcgtgcctgctataataacaccttattatatatacgcaataatcagatccatgatactattttaagttctcttgctgagggagaaggtgtggaagatgaagatatgatttatgctttaacggtaaaggaggaaattatccgccagttgtatcaccacattgaagaacttccagccgaacaacgccgaatcatcttgctgagaattgaagggtatacttgggaagagattgcggaacgtctgggaattagtattaacaccgtcaaaactcaaaagacgcgcagttatagatttcttcgtgagaagctgggagattccatgaattccataattctttgtttatttctctaaaaataagaaaaaacattctgatacatatttgcctttttatagattgattaagttttgttccttttgttaaaaccaccgctatttcttttctgatgtgacaaaatgatatatttttgtcgcaaaaatcgatctctctatattattctactaaaaaaatagaatctttttgtcacccttttctataggttatgtatatctataataaagagaaattaaacagtcgtttaattaaaaaatggtcaataagatgaagaagttcgaaaatgtatatcaagatgctgctttgatgagaagagttcttttgggagaagcggatgaagcggaacaacaggagcttgaaaagcgattggaggaatgttcggacttgcggaagatatatgagcaattgcagaatagtgagacgttgaaagctgcctttaaggaacgtcaaaattattcatcgaagaaagcttatcaatctttccttcaaaaaataggacaagtcgaaccggaaagacaaagacgtcggtctcttcgcatcgggtggtatattgctgccgctgtcgttattttcgcagtggggctttctttctatatgttgaatagctcttctccgaaagaagaaagcagacctttgattcagccgggtacgcaacaagcacagttgaccttacccgatggtagtgtcattgatgtggataagaaagaagtaaatgtggtagtggatggtattcaggtaaaatataaagaaggagtactgtcttatcaatcaaccgttacaacacaacacgaagaaaaaaacgttgaagagcaatcggcaaaatcaaatgaactggttataccgcgtggaggagaaaatacggtaatccttgcggatggaactacggttcatttgaatgctggctctaagttaacctatcctgtacgcttcgtcggcaagcgtaggcttgtagctttggaaggtgaggcctattttgatgtcgctgaggatgaaaatcatccgtttgttgtgcggacccatcttggagatgtgattgtgttgggtactgcttttaatgtaaatgcttacatcaacgcctccgtctgctacacgacactggttcgtggtaaagtgcaattctctgcaccgaatgtggaagctatcactctcttgccgggtgaacaggcagtcgtttcggctaatggttcagagaaacgtacggtggatctggaagaatatgtaggttgggtagaaggcctgtatgtctttaataatcgttctttaggagaaatcatggaaacgttcgagcgctggtatgacatacaagtatattatgaaaccgaagatttacgcaacataacttatagtggtagtttgaagcgctacgggacaatcaactcattccttgaggcattggaactgaccggtgatctgacttataagatcagtggtcggaatattttgatttatggcaaaatggaagattagaagcaaaatagaatattagataagtttaattgttaatttatgagagaaagacgatggctgctatgttttttagtggcgatgtgctgtacgcttagcacatgggctttaccgtcacaagacaagacggtgactttgaatctgcgtaatgtctcagttgagacggctttggatgcagtgaagaagcagacaggagtgaatatgttgtacaattcacaaatgttcaagggagtttctccggtatctgttaatgcaaaaaatgaaagatgggaagtggctcttaagttgattttgaatccgcaagggtttgattatgtggtgaaagatggtattgttgttattcgtaagatgcagacggagaagcgtgaaaatcgtatccgtggtatggttgttgatgcgaatagagagccgataccgggagctagtattattgtgaaaggtactcgtacgggtacttctaccaatattgaaggtgagtttacactggatgtgaaaaacgataaagtgaccttggaagtctcttttatcggcatgaaaaagcagactctccaggtggatgcttctcgtaagaaaatgctcgagataacattggtggatgatgtcaagacattggatgatgtggtagtaacaggatatagtaatgtgcgtaagactagttttaccggtagttctacgcagatttcgggtgatgatttacgcaaggtgtcgcagaccaacgtaatcggtgctttgcagacattcgacccttctttccgcttggttagcaatgcccagttcggttccgatccgaacgcacttccggagatgtatatacgtggccgttccggctttggggtaaaagaactggataaagatcaactctccaaatcaaatctcgaaaataatcctaaccttcctactttcattatggatggttttgaggtgagtatcgagaagatatatgacttggaccctacccgtattgagagtatgacaattttaaaagatgcagctgctacggctatttatggttctcgtgctgcaaacggtgtggtagttatcactacagttgctccaaagccgggagaagtccgtgtttcttataattttaccggaactttggaaatgccggatctgagagactataatctggctaatgcatctgaaaagctagagatagaacgtcgtgcaggtttgtatgacaaaggtaataatggcaacaacacaacggcagatggtttgaataaatattatgaaaaatatgcattgattcaaagtggtatagatacagattggttgtctttgcctttgcgtaatgcttttgaccataaacatagcctttatatagaaggtggtactcctaatttacgttatggggttgatgcatcatacaatggtggtaatggggttatgaaagggtcaggacgtgaccgttatagtattggtttttcattggattatcgagtaaaaaaactacaagtaaaaaatacggtaagttttggacatactaagtcgaaggaatctccttatggtgctttcagtgattatacaagtttattgccctatgagactccttataaaaatggtactttggtgaagcagttatactattctaggaaaggtagtaattctgttaataatcctttatatgaagccacactgagcaattatgagtggagtgcttatgatgaaattatagataatctgagtgtaaactggtatttgaacgattatttaactgttaagggtcagtttagcgtaactaaacaatataccagtagtgagcgtttttatgatccgttatcttctaaagtttcagtttatggtactacggataccaaattgcagggtgatttgttcaccggtgaaggtagtagcttgagttggaattctaatgctttcttatattatacccgtagctttggaaaccataactttaacttttccggtggttgggaagcctctgcttataatactgagaacacctctgcccaatatcgtggttttccgtccggtcagtttaattcgttgaattatgcttccgaaatttacaaaaagccgactcttacagaaaatacgacacgtcgtgtcagtatattggctactctgaattatacttggaatgatatttatttggccgatgcttccgttcgttttgacggctcttccgaatttggtgcaaatcagaaatgggcacctttcttttccggtggtttgggtgtgaacattcataattatgatttcctgaaaggaaatgagaagattaataaattgaaggtacgtgcatcttatggtcgtaccggtaaagtgaatttcccggcttatgcagcaactactatgtatgaaactttatttgatgaatggtatattacaggttatggagctgttcttaaggcgttgggtaataaagatttgtcatgggaaaagactgacaaattcaattttggtattgagacccaattctttaatcaacgtttaacagttgatttggactattattatgagaaaacaattgatttgattaatgatgtgacactgtcacaaacttcaggtttctccacctacaagaataatatgggtgaggttgagaacaaaggttttgaaatgcagatacgtgccgatatttacagagatcgtaactggtcagttgctttatggggaaatatggctcataataagaacaaaatattgaagatttctgattctcagaaagcatataatgaacgtgttgcggaattttataaaaaagaattacaatatcaggcaatttataatacttctttaaaagatgccaattatgcagttccgatttcgcaatatgcggaaggggaatcattgacttctatttgggcagtccgttctttaggtattgatccgactacaggaaaagagctattcttgaacagagacggtagcattactgatacatgggatgtaagccaagaggtggttgtgggtaatactgaaccaaagctaaacggctcaataggtctgaatgctacgtataagaactggagtttattcgctgcttttcaatatgagtttggaggtcaggagtataatcagactttggtagatcgggtggaaaacgcagatattgctaatggtaatgtagacttgcgtgttctaacccaacggtggcaaaaacccggagatgttgccgaatttaaaaatattgcagatagtaaattaacgactttaccgacatcccgttttgtgcaagataaaaagtatattcgactgagtgctttgacattaagttatgactttaacagggaatggattaagaagcatttacatatgaatatgttacggttggaaatgagctccagtgattttattaattggaattctattcggcaggaacgcggtttgagttatcccaaatcttggaaggtggatttctcgttaaaagcacaattctgataaaaggagaaagaaatatgaaaaagatatataaaacgattgtcttactagggacgatagcaactttaggaacatcatgtaatgattggttaaatgtatatccgtccgatcaaatcaaagaggagtttctttttgaaacaggagatggataccgtgcagcattgaatggtatctaccgtaaaatgacttcatggagtatttatggcagtaatctgaaatgggggattatagatgcttgggggcaggtatatgatatggaactgtctgcaatcgccaatggcgggcagcctatgaagaaaattgagattctggattttaaaaatttagagctgactccaactacagaccaaatgtggagtgatgcatggaatatagtggcaaattgtaatgagttggcgcaacaggcggaattggctgatagtacacttttttatgaaggagagtcggagcgccggatgattctgggagaagccatcggtttgcgtgcttaccttcagtttgatttgttacgtgtatatgctccttcacctgctatgaatccgggagagcgtacatttattccatatgtaaacacctatccggcttatgttaataatcgtgagacggtttcctattgtttggagcaaattattaaggacttgcggaaagcgcaggatctgctgttgaaagtagatcagaattcaaattggagcgaccgttttgaagaagtaaagaatgacgaaaacctgtttaaggccagtcgtggatttcggttgaactattatgccgttactgccgaattggctcgtgtgtatctgtatgcaggtatgcctgacaaggcatatgaacaagctgatattattattcagaaaagtgatttatttgctgcactgactgatagagaagaggcgctgaagagaataaaagatggtaatttgaaaatgtatgatgacattatatttgcactttactctcctacagaccaggtggagtgggatcgcttgataaatcattctgatgataaggctgaaggtagtacagatagagaatattttttaggtatttcttctgctattgccagagaacgttatggtgatgatttggaaacggactggcgaatttgcaatcaaatggaacagagaaagagtggtgattatcgtacattaaaatattacgagcagttgaatagttataaatatgctgaagtcaacaacatgattgtacctatgttccgtatgtcggaggtctattatattgctgcagaagctatttataaaaaagatctggacaaagcgaaagactatttgaagcttgtgaaaaaaggcagaggagttgaagatgatttaggcaatgtgacagaagcagattttatggatgttcttgtgaatgacgctcagagagaatttctgggagaaggacagacttttttcatgttcaagcgtttaatgaggacaatgaaaggaagggaagaagtacaagcgactgaaaagaacatggtgttgccgttgcccgaatcggagagtgctatttaatttaaaaagaataaaaacttatgagaacaaaagatatattgtttgcaggagtaatggtatgcatgggcatgtcattctttatttcctgtcaagaagaaggactggttgttaatggtaatgatgtatcttatatcaactttaataaagacataacaaaagatacgactagaatttgttttgagttttatcctatggaagaaggtatggatgtaaaaatagcagaagtgccgatagaagtggctatttccggtaaagttcaggataaagatctggaatttactatcgggatagatgagagtctgtctacttatcctgcatcccaatgtattttgccggaaaaatgcatttttaaaaacggacaactattggatacgatttatgtaaagctgaaaaattcggatgatttaaagacggttaccaaatatgttgcattaaaaataaatgcaggtggtgaagtcagtgaaggcttagccacctattccagggctatcattgctgtgacagaccgtcttgtaaaacctgaatggtgggactataaagacctatatgacggtgagtacagttcggttgactggtattatctgggagattattcggataccaagtaccgtctgtttttaaaagtgttacaggagaatgatgatgtattgttcgatggtaaggataaggtgaaattgcgcaaatattctttgcaattaaagtatatggtagaagaaataaacgctggaagagatcctgatgatccgttgagggatgaaacaggtgtgattattgaaataccggttgtaggataattaaagattaatgatagtatgaaaagaatattgatatatatatatgttttggctggcataatgagtttttcaggttgcctggatgatgaaaacaactatgattatagtgaatttaacgagttggaggggagagagattggaggaatgaaagacgaatattttctttcgtatgctcaaaagttgactattactccgacttttgaatttactattgataaagaaaatccggatgtatcttatgaatggagactggatggtgtattgttgccggaagaaaccggaccttcttgcactttcagttttgagcgtgggggggtacatgaagttacttatacagtaatcgataataaaagcggggttaagttttccaggagttgtacgcttagggtacgttcaccattcactcgtggttggttgatattgagagaaggtgaatctcaggagtctgaactttcttttgtcggtgccagttcggttcttcataagatgacggttactgatggtacaacaatagctgagattgacagagactcgcttgtgtatgatcaagtagtagagaaggtttcggatggattgggatctaacccggtcgggttgtttttgaatgcaggttatttaggtccgtatggtgaagtttttgagacaagtgatgaagtgggagtgatgcaggaccgctgggtggaactgaacggtagcacgttagagcgctctgtttatacagaggatgagtttagaggagatttgccggaagccggtttacatcctcaggctgctgctatgactttttccgctaaagctttgttaaattccgatggatatatttattgggcgggtacggcttttgccagtgattttcattcttgtgcttatacctcctttccgttgggaaaggataaaaagttcaagggagtttatccaagctttaagctcaataagcatcatggagctattccggcttatacagcggataatgaaattgtggggatcattgatgatgcggaagttgtttcttatgctgaacctagtataaaggaatcgacttatagcagtggagtgcatagtgtacaaacaggagagtatgaggaagatcctgtagatgatagatataaattggggaatggagaattgcttactataatgccggcaacctcaaatgatgaggggtatcaggatgttaaacctagttgggtcgcaattgtacgtaacggttctcagtatgaactgttatattttcaatggaaagtgggaaattatcgctattcaagcagagtttctaccaaagtatttgaaaaattctcacttgatggcttgagtggatatacagatatggcagtatttaatatcaagcagtatgtggtaattgctaatggaaacgatttgtggtattttcaatatggggcaggtgataaagcggtgttgaaaaagttgcattcatttgattctcctgttaaggcattggctgctaatgatattaatgtatggtattctggagaaccggctaaatggcaaccggaacataacgggcaattaggagtagcattagaggatggcacgtttggcatttatgaagtttgggaaacggaagacaaacaggcgttggctacagacgtgaagattaatcagcttttcccggatccaaaggctgagaccccggtgaataataattttggcaatattgtagatattatttacaaatatggctctatccgagattttgtatcattcaatttttaaaaagaaaatcatccagacacgatatgggatataaatttggaatactattggctttatttgccggaggtttggttactgttgccaaacctcagcaacaggctaattatgaacttgcagagaagttcaatgcttttgatttaggtggaaaactttccagaaatagcttggccatttatccgcatgagattaatggtacagataatttctggtttgattttcagacaacagacgggaaattctattattatgtgactccggcaaatggcaaacgggaactgctgtttgacaatgatgaaatggcaatggctcttacggagttgacgagagaaacaattgatcctaaggacttttcattccatgaatttaaattttccaaagaccagaagtcatttacttttgaacatagaagcaaaacttatgagtataatcgcataaatcgtaagttgaaagaaatcagaaagacagatgacgataaaaggacggagggagaagttatatattcttggatgaatttttctccggacagaaagtatattctatatgcaaagaaccacaatctttatgtaaagggaaataaggcattgggaatggatacaaccgaagtgcaattgactttcgacgggatgccttattatacgtatgcacgagagcgggatggattcgaaccagataaagaaatggctaccaatgcgcgttggtgtaaagatagccgccatgcttacttcgttttggaagatgaacggaaattacgtgattcttgggtgattaattctttatctaaagtcccccaattggaaaaatataaatatgaatttccgggtgacaagcatgtaacacaatatgaattagtgattattgatgcggtgaataaaacagccagaaaagcgaatgttgataaatggcctgatcagtatgtaatggtgtttgaaacttcttccaaaggcgatttggtgttctttgaacgcactaaacgaacgtgggatgaagtggatgtctgttctgtaaatacaaatacgatggaggtaaaagaaattattcatgaagtggataaaccttatcgtgatcctcatgctcgtaacgttgtcatattaaatgatggaaaagatatcttgttccgttcggaacgtaccggatgggggcattattatcattatgacggagatggaaatttaaagaatactattacatccggtaaatggaactgtggtcatattgtggctattgatacattgggacgagaaatttatttctacggttatggtaatgaggacgttaatcctttttactacagggtgtataaagcaaatattgataaggaaggggctacgcttatcagtaaagaagacgggcagcataatgctcattttttgcagtcgagacgttattatgttgatacttattcacgagtagatatggaaccgaaaattcttttgaagaatgatcagggaaagactatcgttgagttggcaaagccggatttacgggctgtatatgatgccggatggaaacagccggaacggtttgtggtaaaggctgctgataatgctactaatttatatggcgtgatgtggaaaccttcggattttaatccgaataaaaaatatccgattatttctgtagtttaccccggaccttatttcggatttgtacctactggattttctttatccgacagatacagtttgcgtatggcacaattgggatttatcgtaatcgctgtaggacatcgcggtgattctcctatgcgaggaaagacatatcatcgttttggttatggtaatatgcgtgattaccccttagcagatgataaatatgctatcgagcaattagccagccgctattcatttattgatattaataaggtgggcatttatggtcattcgggtggtggctttatggcagcatcagctatcttgacttatccggatttttataaagctgctgtttcttgttccggtaatcatgataattatatctataatcgcggatggggagaatgttataatggtgtgagggagatagaaaagactgtgaaagatagtttaggtaatgagagaaaagaatacgaatataaatttagcgtgaaaacaaatgccgagcttgcgaagaatttgaaggggcatttgatgcttgtaaccggtgatgaagataaaaatgtaaatccggctcatacttatcgtttagcacatgctttaattgaatccggcaaggatttcgatatgcttgtcattccgggtgccggtcatggatatggctctgctgataagtattttgagaaaaaaatgtatcgtttctttgcaaagtatctgctgggagatgaccgggcggattattggggagacattaaccgcaacaaataggacaatagataagatttatgaaaaactccctcttcaaatatgcatgtccggtggttgccttgttggtatgcggctttgtcagcgcacagcagaaggcgaattataagctggcggaaaagtttcgtttgttggagcagaatcctatagtaaagtattcgacagaagtcaggccgacatttattaacgatacggattgtttctattattcttttacgacacgtgaaggaaagaaatattattatgttaatccgaagaagaaagaaaaacgtttgttatttgatacggatgaactattaagcaaaattgcagcatatacaaagaaagcttattcttcggcagatccatatttgtctttcacctttatgaaagataacgaaacgattcgcattgattttgaccgtgggctttatacgtataatattcatacgaaagtgttggagaagcttaatgaaaagccttcttatgggaatgctgacccgtattggatgaaatattcgccggacagtcttttctttttatatgcaagccgtcataatttgtattttgtaggcaatcctcaaaaggggcaggataccatacctgtaaaattaaccgctgatggggaaaggcattatactttcaaccgtgaagaagaaggagaatcagaaggacggtttggagccgaatccgctcattggattccgggtactcatcgtttttatgccgtgcgtgaagataatcggaaagttcgtgattcatggctcatcaactcgttggatactccttatccgacattgaagacatataaagccgagcttgcaggcgataaatatgttacccaatatgaattgttaattggtgacgtggatagccgtgaagtgaagaagattgatattaaccgttggccggatcaatatatcgatgtcctttacgtctcgggagatggaaagcgtttgtattttcaacgttataaccgcacgtggaaccaggcggatatttgtgaagtggatgtggagacgggaaaagtccgtgtcgtgattcatgaggaaaacaagccttaccttgactaccagatgcgtaatgtttccttcctgaatgacggaaaagaaatccttttccgctctgaacgaaatgggtggggacattattatctttatgatacggctaccggtaacctgaaaaatcaagtgacggatggtacatgggtagccggtccgatagcgaagattgatactgttagacgtaaaatttatttttatggttacggtagagagaaggaaatcgacccttattattatattctttatgaggcacagttggatcgttcgaatacgcttcgtctgcttacatcggagaatgcttcacatgaggtcagtatttctccgtcttgccgatatttggtagattcttactctactgtttcgcaggaaccggtaaatgtggttcgtaaccggaatggaaagataatcatgaccttggagaaaccggatcttcagcctgtctatgagatgggatggaaagcaccggaacgttttaaggtaaaggctgccgatggggtgaccgatttgtatggtgtgatgtggaaacctgctgattttgactcgacgaaagtgtatcctattatttcgaatgtttatccggggccattttttgaatatgtacctacacgctttacgattaacgatgtttataatacacgtttggcgcaattgggatttattgtaatcactgtagggcatagaggtggtactccgatgcgggggaaggcttatcacacttacggatacaacaatatgcgcgattatccgttggcggatgacaagtatgctattgagcaactggccgcccgctatccgtttattgatattactaaagtcggtatttacgggcactcaggtggtggatttatgtcggctgctgccatttgcacttatcccgatttttattcggctgccgtttcgtcggcaggtaatcatgacaatcgcatttacaacaaaggttttgtagagattcatttcggtgtagacgaaagggtgaaaacgactaaagatagtttgggagtggaaagtacaacttatgattacagtgttcgtgtgcgcccgaatcaggagctggcgaagaactacaaacatggcttgttactgtttacgggtgcgatggataaaactgtaaatccggcccatacattgcgtctggcggatgcattaattaaggcagacaaggatttcgatttgtttgtattaccgaaatgcacgcacggattcttcggtgagtctgaagaattttttgaacataagatgtggcgtcattttgcccgtttgctgctatatgataattcggctgattttgatgttgatttgaataaagatatgattaaagatgacaggagaagataagatgaatcggatatttatgtatataggggttatagtggggttggcgttaggagctaatcttccggttgaggctcagaaaaagtcgttggatatagaggcatgtacattatggaagcgtattgatgcaccggatatttcaccgacaggcagatgggtgatttaccgtatatcgttaatggaatataatccggataacagagaagagaagccattgcatctatttgattctcatactcgaaaagagatattgttggatggtgatatagaaagattggaattttataataaggaccagggagctttttatcaacagacagactctgggggagtaatgaaaacaatcttgttatcgttgccttcaggaatgaagaccgaatggaagcaccaagaggattttcaccctgtagaagggaccccttattcaatttcggttattaatgtacccaaagatactacaaatcatgttccggcttttaacaggctggtgatacgtcatctgaaaacagaggttgcttttcatattgacagtatcggctatcataccttgtatgacggaggacgttctattcttttcattcgtaaaaagtccggcggaaacgagttatgctatggtcctttagctggtccatataagactctttatcaaagctctataaagaaggagccttcttcttatagttttaatgagaaagagatgattggagagtttagcataaatgattctttgtggtatgctttctcattaaagaagccgggttgtaacctgttttttgaccggaaagagattgttttgcctgatggtatgtctatcggacgtattgacttgtctaaaagccataattttctgaaacttgaacttcggggctcacagcaaatttcacgtagaagggaagaaccggagaagaaaccggacaagagctttgaattggagttgtggacatggaatgaaatggaggttccgactttacaaagaggtggacgttataggcaagataagtcggtgacgtatatttatgatatttcttctaaaaagcttactgaagtagcttcatctactgtagatttactcttaccgtcgggagcggaaaaattggattatgtgctttacacggatgaatctccgtataagatgcaacgtgaatggttggaccagttgccgtttgatgtttattcagtgaatgtgcatacaggtgtaaaacaattgatcggacgtagttatcgtactactccaaaatggtcggtgaatggtaagtgggcggtaatgtacgatcctattgcgcaggtttggaataaatttgatggtgctaccggtaaggttgtaaatatatcagatgctatcggttatccgatgttcgtggaaagttatgatcaaccagctcctgctcctgcttatggaatagctgggtggacggctgacgggaatcatgtatttctgtatgatgcatatgactggtggaaagtagatttgaccggagagcgacagccggagtgtctgactaaaggttatggtcgcaaacatggcaagtctattcgtaaaatgacgagtaatatagataaagacgtttttcagaaggatgaaactgtcattgttagtctttgggataaaaacacaatggatgagggggtttatcagcttgatatgaaagggcgtctgaaaaaactgatggaaggcccttatacatataatatataccgtttttccgataatcataagtattgcgtctggaatcgtcagaatataacagaatttagagatttgtggtggagtaaagcagacttttcaaatccggtcagggtgacgaatgtcaaccctcaacaagcggattataaatggggtacagttaaattggtaaagtggaccaattatgagaataaagaaaataaagggttgctttatttgcctgaagattatgatcctcaaaaagaatatccggtgttggtacagttttatgagactcattccggtgaattgaatatttatcatgccccgttgttaagcagcgcgttgggagatcctgtatattttgctagcaacggttatattgtgtttatgccggatgtacatttcacggttggaacccccggtcagagttgttatgatgctgtagtaagcggaacaaaatatctgatagagcaggggatagcacatcccgggaaaataggtttgcaaggacatagttggtctggctatcaaacatcatatttggtaaccaagacagatatttttacctgtgctaatatagcggctcctatcacggatatggtgaccggctatttaggaatacgtaatggaagcggtctgccacgatattttatgtatgaggaaacacaaagtcgtatgggaaagactttgtgggaggcaaaagataagtatctggcaagttctgcaattttggaagcagacaagatacatacgcctttattgatattgcataatgatcaggatgaggctgttgcgtatgaacaaggtcgtgccctttatctggcaatgcgtcgtctgcaacgtccggcatggttgttgaattacaaaggtgaggggcattttgtaatgggtaggggtgctcagaaagattggactatccggatgatgcagtttttcgactattacctgaaaggaacaaaagaaccgcgttggatgaaagagggtattcatttaagagaacgtgggattgatcagaaatatgatttactagaaaaataaataaaatgaagaaattattaattacagctatggctctgtcttgttttgcattcagtagctacggacaggacaaagtggagaaacaaattattggtaaatggtgtaatccttatacttataaatcgacaggtgaactgaaaggttttgaatttaaaaaaggtgggaagtgctctgcaatcaatattccctctttggatttaaaaacttggaagattgataaggatggttatttgattatcgaaggattcagcaaggaagataatggaaaggtagaagtatataagacccgtgaacgtattgggctcttgtctccagactcattgcaactggttacacaggaagcaaacccgagattggcttttttgtatctgaatacgaaatcgataaagaagttggttactccggaagttgcaccaaaagaaaagtaataaatctctctcttaataatttagtgttaatttagcattatattgctaatagaagcacctcatcgtagggattacgatggggtgtcctttacttttttatatcaaaattgtagctcattatgttgggatattcctaaaataataaaatttaaggcaactacttcattgcgagttagttgccttttttgtatctttaagcattccgtgcgacaagaagtcgtataagtaattgtttagcactgcgtctaaacctattgttccgtcaatagtagcctaaagaggcgtgctttactagtaatggtttggtgcgaagccctcttgacaatgctgtcctttacagaaatatccaatgtatgggctgttaggctgactgatatgagtaacatatgtgaatcgctgcaccatcgtaataaagaaatagcttacggatatttacaagctatagccaaaaggcgggcagtcaggatagtctttttgggatgtaaggctacacggacatcatactgccggtggagaggcggactctaagtcaatcgtcagttacttgtatggaacttggtaagcccgtagtttctcctagctgtattcgggtaggtaagctaaagccgaacgaggtgcgggtaaaggattgcggagaaagcgaaagcttccgtgtaatgcggaggatagaggtttaaacgtcacctcatgcgaaagcaggcagacttccgcagggtaattctttgtgaaacgattgtagaactcgaaagaaatgaagaaacagcaaaggagcaaggcgaaagccgagtgtgcatcttcagccaagcacagcaatacatggaaagaaatagatttttccaaatgtgagtgcaaggttagaaagctgcaaatccgaatagcaaaggctcagaaaaagaaaaggtacaacaaggtcagagccttgcaacaccttcttgtcacttcttacgaagccaaggcattggctgtaaggaaggtgacctccaataaaggcaaacgtacggcaggggttgaccatgtattatgggacactgatgccaggaaggtaaacgcattgtgttctttgaaacggagagggtacagagccctcccactgaaaagggtcaacatacccaagaagaacggaaagatgagaccgctcgggattccaaccatgagggacagggctatgcaggctctttatctgatggcattggaaccagttacggaaacaacagcggatgctaactcttatgggtttagaaagttcaggagcacggcagacgccattgatgccctgcacagatggctaagcagggattgttctccccaatggatattggagggggacatcaaagggtgcttcgaccacatcagccacgaatggcttctcgataacgtacgaatcgacaagcatatcttagggaaatggctgaaaagtggagtcgtattcaacaaactgctccaaccggtcgtagaaggtactccgcaaggcggtatcatctcaccgacacttgccaatgccgcacttgatggcatggaaagaatactgaaagagaagtataaggtaagttatatcgatgggaggctctatcatccgaaagtgaattgcgtgcgttatgcggacgacttcatcgttacagcagacaaacggaaaacattggaggatataaaacacatgctgacaaggtttcttgagaagcgtggtctcatgctatccgaagaaaagacactgataacacacatcagcgagggatttgactttttggggttcaatgtccggaagtataacggtacattgataatcaaaccatctaagaaaagtcaaaaacggttcaccgtcaaactgcatgaaataatcctagccaaaggcaaagcattgtcgcagcaggaactgatagggaaactcaaccctataatacagggatgggggaactattatagtcatgtggtttcaaaggaagtgttctgccgatgtgatcaggtcctgataaatcagataaagagatgggcatatcgcaagcataccgacaagtcaagagaatggatacggaacaaatactttatccgtgatggaaacagaagctggatattcggactcgaatatgtatgtggtggtataaaggataagttcatactacgtaaactggcagacattccaatcaggcgacatgtcaaggtgaagtgcgaagccaatccgtttgacccttcatgggatacctactttgaaaggcggaaacgaaagtatgcctgtcaacgtgcataataaaactttattggaaacaagtcatcgaaagagccggtttaatttcgtgagaattaaatttagaattatcggagctgtatgcggtgaaagtcgcacgtacagttcttaatgggggaagcggcagtaatgccgctgacctacatacccccccaaaaaacggtttgacggccaaaacgggggtaatctaaaataaaaacacatggtaaagatacaaaaaatctcagaaatcgaaccttgtttaggttttaccgagttcgatatgcttaaaaaatatcgtcaaagttttgcaacgagtgaattaggtcgactccattctctattccctttctcggaactggcccgacaaatgcatttgaagtcctctgctttgggtcgtaaaagttatttttctcccgaaggtaaaatagccttgatggtcttgaagtcctataccaacttttccgatgcacaactgattgagcatttaaacggtaatattcattaccagttgttttgtggtgttcagattgatccgcttcatccactgaccaatcctaaaatcgttagtgcaattcgtcaggaactagcggatcgccttgacgttgagtccctccagctcattcttgccgagcattggaaaccttatcttgagaaccttcatgtctgtatgaccgatgccacctgttatgaaagtcatctgcgttttcctactgataccaaactcttatgggaaggtattgtatggcttcatcgtcatctgtgcaaacattgccggaccttgcacatacaacgtccccgtaacaagtatcttgatgtacgccgtgcctatcttgcttatagcaaactgcgtaaacgcaggaaatcacagactcgtatgattacacgaaggttacttcagttattggaaaagttacttgaccagctggagcagcttcattcatcctacaggaacaggcttgcactatcctctgattaccaaagacgtttctcggtcatacagacagtccttgagcaagggaagaatttatttgcaggcaaaaaagtgtccaaccgtatcgtgagtatcgaccggcattaccttcgccccattatcagaggcaaggaaaccaaatccgttgaattcggagccaaagtcaacaatatacagatagacggaatctcctttatagaacatatctcctttaaggcttttaacgaaggagtacgtttgaaagactgtattcatctgcaacaacaactgaccggggttagggttaaggcgcttgcggcggattcaatctatgccaataatgccaaccggaaattttgtacaaaatatcatataagcacttcctttaagcgtaagggcagagctgccaaagatgagccgcttcggagaatcttacggtcggaactcagccgagaaagagctacccgcctggaaggaagttttggaacgcagaaacaacattactcactggccaggataaaagctagaaacaggaaaacggaagtactttggattttctttgggatacatacagccaatgcggtatgtatgatagaaaaggtcgaaaagaaaaaaagaaaggcagcataatctgactaaaataacaggaaaaacaggagaggttttaacttcccctaaaaaagacatgtacataatgcatgggtgggaaggaaaaaacaagaatatgtaaacaatattctacaaaaaagatagaagactgggagagttgaacgaaaaaatcaagagaaaagctttgctttacgtgagcttttctcttgattttttagaaagaggaacatttactgaatatccctaaatagtgttagcaattccgttgctaatgaaaacgctccgtcgtagtgattacgatggggcgtcttcattatagttagtgtatgttacagtatagtatgttgtagtaaactgattactttttgaaaccgtttgctgtggaggtttgcttacacttgtcgcatagccaatgccttattctccgcagcttccataatttcccgttctccgggtcctttatcgttaataccgcaaagatgaagaattccgtggataatgacacggtgcagttcgttgtcataagaagcgccaaattgctccgcgttagtgcgtattgtgtccaggctaatgaataagtcgcctgataaacgatcgccttcacaataatcaaaagtaatgatgtccgtgtagtagtcatgttgcagatactgacggtttacctctagaatcttttcgtccgagcagaagatataagcgatttcaccgagtcttttcccgtaagaagcagctacggcttttatccattccgtagtctcacgtttcttgatatcaggcatttttacgccttctgtttgataagttacagccataattgaatgttatgatttaaaagaaaaataaataactgattaagatagcggctatgatacccgagaagtctgctatcagaccgcaagtcaccgcattacgagtcttggtgatccccacactgccgaaataaacggccagaatgtagaatgtagtgtccgaagctccgcgtactacacaactcatgcgccctacaaacgaatccggtcccagttctttcatcgtatcaatcatcaggccgtttgcaccgctgccactaagtgatttcatcagtgcagtaggcaaggctccgacaaagcttgtatcaaccccacatagacctactatataaccgatgcctcccaccagaaaatccattgctcccgaagtgcggaacactgcaattcctacaagaaaagcaaccagataagggatgatgcgcacagccgtcgtaaacccttctttagctccctctacaaatgaatcgtatacattgatttttttcctgactcccgtcaaaataaacaggatgatgacactgaacagcagaatattcgctatcaatgtagaataagtacccatatcctctcgtgaaacgcttaggaacaagtaaatcaagccggaaaagaaaagacaaataatgcccattaaaaggagaataggcttattgattaagtttatcttttgagcgatgctgactgctatgactcctactaaagtggaaatgaaagtacttagcagaatagggataaatacatctgtaggctgtgcagcccccatttgtgcacgatataccatgatactgatcggaatgatgataaggccagatgtattaatcaccaaaaacataatcatcggattggaagcagtgtcctttttcggattcagttcctgcagctctttcatcgctttcagccctaatggggtggctgcattgtcgaggccaagcatattggcagacatattcatgaagatggaccctaacaccggatgtcctttaggaatatccggaaacagtcggcaaagcaccggactaagaaagcgagccagtgcgttaatcaatccactgttttctccgattttcatgatacccagccaaagagccagtacgcctgtaagtcccagggatatctcgaaagctgtctttgaagagtcgaatgtagcgttcatgatagccgtaaatatctccgtatctcccagaaaaatcacttttacaagggcgatgataaaggcgacgacaaagaatcctatccaaatgtaatttagaaccatagttgatagcgtgtatatagatagtgcaaaagtagttattacgtttcaaataaactaaatcttcgtctttcttatactgaaaatgaatgtaaatctctatctttgtctcctacttttcaagaaataaatggaacaggaagattttaacatacgcgaacatcagcttacttcaaaagaacgggatttcgagaatgcactccgtccgttaagctttgaagactttagcggccaggacaaggtggtggaaaaccttcgcatttttgtgaaggcggcacgtctgcgcggcgaagcactcgaccatgtgctgttgcatggccctcccggattaggaaaaacaactctttcaaatattatcgccaacgaattgggagtcggctttaaagtaacttccggtccggtgctagataaaccgggtgacctggctggtgtattgaccagcctcgaaccgaacgacgtgctttttattgatgaaattcatcgtctgtcgcccgtagtggaagaatatctttattcggccatggaagattaccgcatcgatattatgattgataagggaccttcggcacgcagtatccagatcgatttgaatcctttcacgctggttggtgcaaccacgcgtagcggtctactgacggctccgcttcgtgcacgtttcggtattaaccttcatttggagtattatgacgatgatattttgagcaatatcatccgtcgttctgcgtccatactggatgtaccttgctcggtacgtgcagcatcggagattgcttcccgcagccgtgggacgccccgtattgccaatgctttgcttcgccgggtacgtgacttcgcacaggtgaaaggcaccggctctatcgatacggagattgcccagtttgcgctggaggcattgaatatcgacaagtacggactggatgagatagacaacaagatactttgtaccattatagacaagtttaaaggcggccctgtcggtataacgaccattgctacggctttaggagaagatgcgggaaccattgaggaggtttacgaacctttcctgataaaagaaggattcatgaaacgtactccccgcggacgtgaggtaaccgaacttgcctataagcatttgggaagaagtctttataacagtcagaaaacactgtttaatgactgacataaagcggcatgtgacaagtggtattaacggtataaaagaactttataaagcatagttggatgatgaagcaatggattactttatttgtttttctctttttgagcctttctttatcggctcaacagggatatggaagagacatttttgtttcttctaaaggagattctttaccttatcggatgattcatcccgaatcggtgaagccaggtgaaaagtatccgctcgtactgtttctgcatggagccggcgaacggggaaatgataatgagaaacagttgactcatggtggacagatgtttcttaatccggtcaatcaagagaagtatcccgctttcgttctaattccacagtgtccgacagacggttactgggcttatacaggacgtccgaagtcgcttatccctacagaaatgccagtgggacaagagatcagtcctatattgcaaacgcttaaacagttgctcgactcttatctggtaatgcccgaagtggacacacaacgggtttatattatcggtctttcaatgggagcgatgggaacgtatgatttagtcgtgcgttatccggagatttttgcagctgcagttcctatttgcggtacagtcaatccaagtcggctatcggttgccaaggatgtgaaatttcgtatctttcacggagatgcggacgatgtagttccggtgaaaggttctcgcgaagcgtataaagcactgaaagctgccggtgcagatgtggaatatattgaattccccggttgcaatcatgggagctggaatccggctttcaattatcccggatttatggattggttgttcaaacaaaagaagaaacgttgaaccaatctgaatgataattactaataaaacatggctggactaaaatcattagctaaagatacggcaatttatgggttgagtagtattgtcggacggttccttaactacatgctggtgcctttgtacacagcggtattgccggcttccactggaggttatggagttgtttcaaacgtatatgcgtttacagccctgatgcttgtactgcttacgttcggtatggaaacgggattcttccgttttgccaacaaatcgggagaagacccgatgaaagtatatgccaactcgctgttatcggtaggaggtgtatctttgatttttgttttcctttgcctgttattcctgcaacctatttccaatttactggattatggcgatcatccggagtttatagcgatgatggctgttgtggtagctttagactctttccaatgcattccttttgcctatttacggtataaaaagcggcctattaagtttgctgccatcaaactgctctctatcgttggtggcatcggtttgaatttatttttcctattggtgtgcccgtggctgaatgtacattgtccgtcaacgatctcctggttttatgatccggattatttagtgggatatatctttattagcaacctgattatttcggttgtccagatgttcttctttattccggaactgacaggttttgcttataagttggacaaggtattgctgaaacgaatggtcgtatattctttcccggtattaatcttaggcttggtaggtattctaaaccagactgtggataagatgatatatccgtttctttttgaagaccggcaggaagggttggtgcaattgggtatctatgcggcaaccagtaagattgcgatggtgatggcaatgtttacgcaagctttccgttatgcttacgaaccgtttgtctttggcaaagaccgagaaggagacaaccggaagatgtatgccgctgcgatgaagtattttcttatattttccttgctggctttccttgctgtcatgttctacctcgacttgctgcgttatctggtggcaaggggttactgggaaggtctgggggtagtagccattgtaatgcttgcagagatctgtaaagggatctatttcaatctttccttttggtataaactgacggataaaacctattggggggcctatttctcggtgattggttgtgttattattgtcgtattgaacatcctgtttgtgccggtttacggttatcttgcttcggcatgggcttctgttgcgggctatgcagtcatcttgttgctatcctactggataggacagaaagaatacccgattcattatgacttgaagagcctcggactttatgttctgctggcagcggtactttacgttattggagagcaggttcctatccctaatatagtgctccgtctcgctttccgtaccgtactcttattgctatttatagcctatattattaaaaaggatttaccattgagtcagattcctgttattaatcgatttataaagaagaaataactatgaagacagatgaacgtaataagtttgctatcaagtcctttctgggagaatatctggacttgagaaaagacaaggataacgaactggccacagtggattctatccgtaagggggtagagttcaaaggtgccaatttatggatcctgatttttgccatctttatggcatcactcggattgaatgtaaactctaccgccgtaattatcggtgccatgttgatttctccgttgatgggacctattatgggggtgggactgtctgtcggactgaatgactttgaattgatgaaacgctctttgaagagttttctcatcacgaccgctttcagtgtgactacggcaacaatctttttccttcttgctcctattgccggttcacagtcagagttgctggcacgtacatcgcccactatttatgatgtattcatcgcgctttttggtggtttggcaggtgtggtagctctctctaccaaggaaaaaggaaatgtgattccgggtgttgccattgctactgcattgatgccgccgctttgtacggcaggttacggactggcttccggtaatctcatttatttcctgggtgctttttatctttactttatcaactctgtttttatcagcctggctactttcctcggtgttcgtgtgatgcatttccaacggaaagagtttgtggataaaacccgtgagaagaccgtacgtaaatacatcgttctgattgtagtgcttaccatgtgccctgcagtttatctgacatttggaattataaagagcactttctatgaagcagcagccaatcgttttataaacgatcagttgagctttgagaatacgcaggtacttgataagaaaattagctatgaccataaagaagtacgggttgttttgattggtcctgaagtgcctgacgcttcgatatctattgctcgtagcaagttgaaagagtataagctggaagatacgaaactgattgtattacaggggatgaacaatgaggcggtagatgtatcttctatccgtgccatggtcatggaagacttctataaaaacagtgagcaacggcttcaacaacaggcggtgaaaatttcccaactggagacaacactggagcaatacagaacgtacgatgctatgagtcgtacattagtacccgaattgaaggtactttatccttccatcacaactctttccatcgctcactcgctcgaagtgcgggtcgattcgatgaagacggatacggtaacattggctgtccttaagttcgccagacatccgtctgttgctgaaaaagagaaaatcagcgaatggctgaaagcccgcgtaggaacgaagaagttgaggctgattacagaataatgaatctaaaaataataatatgaagttcagactaaccgtcttgatagtcttttctctctgtctgtcgaatgtatttgccgatgagggaatgtggttgttgggaaatctccgaaagaataaacagactgaccgggtaatgaaagaacttggtttgcagatgcctgtgaataaaatatatgatccgaagaaaccatgtctggcagatgctgttgtcagttttggaggcttctgttcaggagtggtggtttctgaagacggtctggtgtttactaatcatcattgtggctttagcagtattcagcaacattcttcagtggaacatgattatctgaaagatggtttctttgcacgtagtcttgaggaagaactgccgaatccggagttgtatgttcgtttcctgcttcgtacggaagatgttactaaacgtgtattgtctgccgcccggcatgctaaaacggaaacagaacgtcgtgtggctgttgattcgattatgaatgtaatcagtatggaagtctccgaaaaggattctacattgactggtattgtagatgcttattatgcagggaatgaattctggctttctgtttatcgtgattataatgatgtccgcctggtttttgcacctccttcttctgtcgggaagttcggatgggatacggataattggatgtggccgcgtcatacgggcgatttcagcgtatttcgtatctatgctaatgccaagaatggtccggcggattattctcctgaaaacgtcccttatcatcccgaatatgtagcacccatttctttggatggatacaaagaaggttctttctgcatgacgcttggctatccgggcagtacggaacgttacctttcctcgtatggtatcgaagagatgatgaatggaatcaatcaggcaatgattgatgtacggggagtgaaacaaaccatctggaaacgggagatggaccgtcgtccggatattcgcattaagtatgcttcaaaatacgatgaaagctccaattattggaagaatagcatcggaacgaataaagccatcaagcatttgaaagtgttggaaaagaagcgggtggctgaagcagagcttcgtaactggattcagtttcatccggaagagagagagaaactgattcgtttattttcttctttagagttgagttatagtaatcgccgtgaaaccaatcgtgcgttggcttatttcggtgaatcgtttataaatggtcccgagttagtgcagctcgctcttgaaattctcaatttcgactttgaggcggaagagaagttggtgataacccgcatgaagaagttactggagaagtatgataatctcgatctttccattgataaggaggtttttgctgccatgctcaaggagtatcagtcgaaagtggataagaagtatctgcctgctatgtatgaaaagatagatacactctataacgggaatattcaggcttatgtagactctttgtatgcaacgtccaatataacgtctcctaagggcctaaaacgtttcctggaacgggatactacctataatctgatagaggacccggctgtttccttgagtctggacctgatcgtgaagtattatgagatgaatcagagtatttccgaagcttccgagcagatagagcaaggggaacgtttgttcaacgctgccatgcgccgtatgtatgccgatcgtaatttctatccggatgccaattccaccatgcggcttagtttcggaacggttgggggatatactccttttgatgggaccacttacgattattataccactgtgaaaggcatctttgagaaggtgaaggaacatgcaggtgatattgactttgctgtccagccggagttgttgaatttgctttcttccggtgatttcggaagatatgccaatgcacagggagacatgaatgtttgctttatttctaataatgatattacaggcggtaattccggcagtgccatgttcaatgctaaaggagaattgcttgggctggctttcgatggcaactgggaagcaatgagcagtgacatcgtatttgaacctgacttgcagcgttgcatcggagtagatgtgcggtatatgctctttattatggagaaatacggtaaggcgggcaatcttgttcaggagttgaagataaaagaatgagtttatcatataaactaagttgcattctaataataagtattggagtgataagctccaatacttattttatttcttttgttggactttactgtatgtaaatcttatctgtggttgttggacatagatggcggtagttctccattttgtgaccatttggaaggtttcggccccattatgaattctaaagttcctccttcactgatatctccatgtcgaaaccaattcttagtaagaggcttgccattgagggtagctgactgaatatagatatttttatcattattcttttttgtcacaatttttaaagcttttccattttcaagatgaataattgtttctttaaatattggacttgaaatgaggtacacatcttgccccgcattaggatagaatcctaaggaatggaaaatataccaagcagacatggaacctgagtcatcattcccaggaataccgtcacgtgtcgttttatatctgtttttcaagatataccggactattttagctgttttgttttgttgatttacgtaattgtatagggtaggtattaggaatcctggttcattggctatttggaatagccctatatgatatcgctggtcccatattttatgggtgaagaaggtatctaatctttgtgtaaatgctttttctccaccacacttgcggactaagctttccatatcatgtggtacgaagaatgataattcaaaagagaaagtttcataagtcggctctccccaattacctcctttcaaggtactgaaatgttctttattccaatatttacccttttcatttcttggccatgcaaaccctgaaaatcccagacttgttattgtgtcattccacgtattttgccagttagatgcttttttataatattcattggcaatatcttgctttcctaaacgctcggctactgtagcgatagcaaaatcacaattggaatattcgaatgtgcgcgttaagcatctttcataagctgatgaaacatagcctaatgaattataatcagatattccgcctctgccttcttttctttcatctccaccgggagctactttggcattttttagcatggcttgtaaacctgcttcgtaatctattccctgcagatcctttaccattgcatcggcaatcagaatatcacaattacttcctccttgtacccgtccgttatcattgccgctgcgtgcatcaggcatatatccttcatagcggtaaatgtctatgagtgagcggaccatgtttgactgtacagaaggagtaagtaaagtaaataatggatgagtggcacggaacgtatcccaaatagcgtagaaatcgtcaaagttcggttctgttgatatccattttggattttctccggtcttgtctattggctggagataacaatgatacaaagctgtatatagttttattttatcttcttcgttgcctgtgacttcaactttatttaagattttgttccattcagatacagcttgagcatgtactttatcaaagtcccaggttgttatctgctttaaattttctttggctttgccacagctgatataggagatacctacacgtactttgattttctggttttcagaagtagaataacacaaataagcacctgtttttttacctgagtcgaattgctcgctggtattgggcattaaagtattccctttccatgtaccgaaactttttgcaggtgtatctgtttctgcataaaaatagacagtataggcttctccttcattccatcctcctcgtacacgagtgtagccttctattgtagaattggaaagtatatgtacttcagaaccgataactttttgagtttcacatatttgtaaagctagacaactacctaaatcaaaaagaattttggaatctttattggaagggaaagtgtattcatgaaaaccggttttgcttaatgctgtcagccgggccgccgtgtgataacgcggcaactcaactttgtattctcctaaaacagtattctcgttggcacggggggaagaataattttctaaatgtatatctccggtcagaggtaacattaatacgttgccatatttgcatcctccgccagttccgcttacatgcgtgtggctgaatccatgtatgttgccatcgggattccagccggcattccagtctttgttaccgcaatcaggaccgagttttaccattccaaatggagtacatgctcccggaaaaacattgccgccgccgtctacaccgatgaaaggatccacatagcgtgcgttgcctgttacaacttgtgcttcagcggatgttactgatagcagtgctgtcatacaaattaaaagttttgtttttagcatatttcttcgtatttgagtattttggatattcgatttacaatggctttattctttgcttgattcccaaatagacaaaagagcgtatagttcaacaagtgctccttgttttaggatttcccatttattcattgagacagttccacttaaatcttcgtcattaattaacccgcttatatgatgtgctttaccaaaccatgcgtgtaacatcgtgttccgtatgtcttcaatatatgagggatttttatcaattgaataaagttcgaaaaaacctcgacacatgatggtgttaaaccaagcatgtcccggtgacaaaatattgaaatcacgttgtaaaatttctgaatgataaggggtaaaccattttttatggcaggcttttgctatctgtcgagctgttgtcagataagatccatcttcggttattttatagagaagacacgctaattgcaatggttggcctgaattatatgaatatttatttgtttccatgcgtcctatttgggttggattttcaggattgggagaagcattgtcatagtataaattatcgttaggatcacgcatataagtttgtaaccagttgaaacattctattgctttatccaagtatttttgctcatgggtcaataaatatagcttgcagctcagtacacctgccggagctgtcgagcaagtgtgttttgatatacttggttcattcaactctttccaatgaactccaccaccacaagtattgtcccatccatattgtgacaagtaatcccaaacctttttagcttgatttaaataacggacgtctttagatatggaataccattttgccatgtctagtcctatccatgcattatcatcataaaaacgatcatttccggaatccggatatacgctatatgcggtacgtccatgatctgtcacccaaaaatgctggattccattaaatatatcattttctagagaatggtaatatgcttcctgctctgtacctatagatgcttctcttatggcgacaaatgcagatagtcctcctccttgtccccatactgttgcatccccatcccaataaccttgttctttgggataccatgtttgccaacacgttctgggacctttatggtagtaatatttcattacacatgacatcatagaatgggcgcagttaaacatttttgtttttatatattcaaatgtacttgctgtttgacttttggtttccgagcgcacttggtcattatttatcagggtgattgctatttcataagttcctgcggagggtacttttagcagataggttcccctgtatctgtactcatccccatctagtgctattgttgtccattcactagtttttcccaaagaaatattccggtgggcaatttctatctgtatgtcttttatataattgtctcttgtgaagtttattaaaaattctttttcccggtttgtcttttgtactttcaattgtcttacgggagcgatcccgtgagacaattggtcttttgtagagtcatcactacacgatagtgccgtacatatgatgattaatagaaatatactattcaaaattttcataaactatttttttaccattggattgcctgatcttcatccggtattgttatgttaatcttccgttccatgatcaatgaaccttctgctcgataagaaataggagtgtcggatgtagttacatcgtcatatgtgtatttgatgtataatacataataccgatgcattaaatagggctgatttgtatccatttcttcccaaatttcgtaagtagggtgacctataagttggaaattaattgaagtattttctgccgttattgtcaggtttccagtttttctagtctctgtaacttctgacggatcttcaaattttactttaatcttataagtttcccggtcaatggcgtcatctgctttggtgccgacatagaaaaaaactgtgttctcatctactacatgtgctctacggttgtctacaactagcgggtctgtatttgaatcggcaaaataaatattcatggcagttgccgaatagtttccggaataatcattgaacggtaatacatgcagtaaggcctttctccatccttttcgtttgttggtaacataagatggatcttcttcaatagttagaggtagcacccattcttttgataaattcattccggaaaatttgaatttaatcgggaataattctgtccttgaacctgccggaatatggcaagtagtagaagtaaattcataattattctcgggcaacagctcataccataaatcctttctaagttcgtgaaagttggcttcattcatagcttttagcgtatcgggatctacagcaatctgtacatcaatagctttgtctaatggagtggaaccgctgactaatactggaaggttatagatagcttcgccattgggcttgtaacggacatatatacttgaaacttctccatcattgattggggcctttaatgagaccatatgggtatacagttcgtccttccattcatcgttgcatgcattgaacaaaaacagtgcattaaataatataactatataaatgtattttttcattttttattttttcattttagattaatcaaaagtttcccatcccggtgcttgtgtcatttttagatttctttttagttcatcttgaggcatcggccagaaatacattttacgtgaaaaatttgattgtaaattttcaacacgtatgcgctcatagaaacgatcttttttattttcggtcatcagtacattgtaaccatagatttgttcagattcttctgttggtgcaattttccaacggcgtaagtcgtaataacgttgattttcacccatgaattccacttggcgttcgtgtattaatttcttgcggagtaatatttgatcatcatatgtcgaatcttcataatcgggaactccggcacgcatacggacaggacggatccctttacgcatatcttctttattccgtgaaacagttaatggctctccttgccaggttgttacttcataactactacctggagtcagttcatttaaggcttctgcatacatcaacaggatgtctgcatatcgaagtggtacatctactttatcaaagatttttccaccgttggtgttgcagtcattggggctgatgaatttcatgatgccaatgcctgttggaatccaataatcggaagcattttttcttccattgtcactacctctgtaataccatatttgttgattgcgtttctcatcatcctgggcacttgccagcgcccaaaatgctccattaaatgcaacgctggcatagaagcgtggttcgcggtttacatattctttccatactcctgtacgtacctgtgggtaaagtccacgattatgctcatcttctgaaacaaaacgcttacttacttcacaagtatctaagaaggtatttagactgaatgagcttccatctgccatatcataagcgtcacattgtttaatggttaaaccatgacgattccttccgccagcgtttgtaggtagctgatcaagaacaaggtctttgacttgatcattcaatgcgttgtttcctctcgtaaatattaattcaggattctcggaggcgtataagtcgccattgaagagtgaacgataagaagcaaatggatcaatatcagcccatccttcgggaaaatccttagtagaataaatcggatgatgaggcggttttattgttgcaggataggcattgtctcctttcgcctgataaggggcagtatataatttgtatacaccagttttggtagctaaatcaataacatcttttgcagcagctgctgctttagcccatttgctttcatcataagtttgagccatcaatatgcgtccttgatgatctgtaaaatctgaaaatttatcagggtcttctggacgtggattgtttatagggcttgctgtatacaataaagcctttgcgcgtactgccaatgctgctcctttcgttgcacggttaatattttgtctgtcccgtttttcaggcagtgcttgtgctgctaataccatctccttgctgatgtaatctaccacttcatcatagctgttacgtggataagacatacttgtatagtcgccatcgatgctaattgtttcttcaggcacgaggggaactggtccatattttcttaataacaaccaatagaaatagcttctcaaaaagcgggcttgtgctttatagtctgcaatttcttcttctgttaattcttcattgatatctacattgctaattaagattgaagcttggcgaataccttcatagcagcggatatatgagttgtttgtccaggtattgtcatattgtccgaatttaaacgcattatagcttatagctccgctggtttcattgaaaatcatatcgtctgcaaaattggttgtggaatagaagatacgtgtgatttccaaattagtttctaatagacagttataacatttagcaagccattgttccgtaaaaactttgcttttgaaaattttttcttcactttgccggtctttaaaaaaacgttccacacttaaatagtctgaacaagaagaaatgcccagtccgagaactaaaatagttactatgggtaatatatgttttttcatttgttttaaattaaatgttaatggtgagtcctaaagtatatgatcttgatagcggatatgcttgaccgttgctgctatttagctccggatcccataatttgaatttggagaatgtcagtaagttggtacccataaagtacagacgaacattgttcagtgaatcttgttaataatatttttcggaatattgtatccgatttcaagattctttaaacgtaagtaagaaccattgcgcagccaatgtgtagaaggacgatagttattttcattaccgccataactcagacgtgggtattctgcattcggatcttcattttcacccaagatccaacgattagcatttgccatgtcagcgaggatatttccccaatcgccgtctttgaaaggatatacagtaggaccttcgatacagaaagtcgatttgccggcaccttgaaagaggatattaatatcaaaatctttccattgtgcagaaacaccgaaaccgtaaatcaaattaggacggctggttgcaccgataggcacttcatcgttttcatctacttttccatctccgttgacatctgcatatttgatatcacccggcattacatctccccaagtctgttttggactgttacggatatcatcataatctttgaataatcccaatgagataagaccgcgagtttggtctacacggaagccctgctggcttttgtaaggataattgctaaattcctcgtcatatttcaggattttactcttactgtatgtaaagttaccgcgaagtgtcaaattgacgtcaccgatacgttgtgtatatcccaagttaccatcaaatcctttggaaactacggaaccgatattagtcgataatttcgtacctgttcctgtaccatacattcctacagaaagaggaatatagttacgctcttgataaataccgtcgcgttgttcgtggaagtagtcaattgtaccagttaatttgtcattgaacaacgaaaagtcgatacctacatcatgtttagtggctacttcccaagtaacagcatcggttgcatagtaagtataggttaatccgtcgaatatgtattcttgtcccagatctgcataattgtaattattgcttgttccaaaagtagataagtaagggaaacgtctttccatattgtcattgcctactttaccgtaagaataacgtaatttgaacatattgatccatgacaatttgtttttaataaaggactcttctgctatattccaagctatggagtaagcgggaaagaagccgaattggtgtcctgttgcaaaattttcagaaccgttgtaaccgaagttgaaatcaacaaagtagcggtatttccaaccataggtgaaacgtcctgcaagtccctgatggcgtttatcgataccttgcatgatatccttgtcatcttctatggctgcattgatagttttatcttgtgtatattttatcacacctcctataatgtgatcgccaaaagtacggtcataatgtaattctgcttccagatattcttttcgttcaccggttgatctgctttcttgtgacattaattgttcatccctgacctttctcatgacaaggctaccgtcggaagctctattttgttcagctctccataattctggtatttttttgcgattgatccattggtagttattggtatcaaaaccatatcgtccgataaatttcagacctttagtaatgaaactgaaatcttgttcaagagtaacgttggtttgcagtttattattccaggtttcctgataaccagtttgtgtagcgattgtccatgggttaatttgttcgtcttttgaaccgaaagcgggagtatatccgttagaatacataaccggtactgagatcggattataattcattgcggaagcccatacattgctggccatacctggttcattctttttgtccaatgaacctgatacacctacttttaacagtgtagttttagtgatatccatatccacattcaaacgatagttccaacggcgataattggcattggtattatagtctttcagtcctttgtccactttatacataccgccttcatctacataactggcagatacatagtagcgtgccaatgaaccaccaccgttcatgttgatagtagcacggtaagtgggggcaccttttttcagtagtatgtccatccagtctacatttggatataagtcttgatccaacccattgcgtagtatatataatttatcttcggggaagaaaggttcctgattacgggtagtacgtgcttcgttcatcattaaagcataagtgtatccgtcaacaagttcaggagttttagtacgtgtattgtaagtcgtttctatttttgcgtcaatgtgtacctttccttctttaccgcgtttagttgttatcaatactacgccattggcaccacgtgagccatagatagctgtggcggaagcatcttttagtacagtaaaagattctatgtcttcaatgttgagttcattcatgtcgcgttcgaatccgtcaaccaaaactaaagcacttgcaccggcaccgaacgtggaaattcctcgaatccagaactcagagacattgtttccgggttgtccggaagtttggcgagccattacaccggctacgttaccagctaaagcgttgctgatacttgcagtagaggtttttagggtatttatatttacattggtaacagctccggtcatcgttatcttcttttgcgtaccggtacccgtaactactacttcatctaaagctgtggctgtagcttctttcattaccactttaatgtttttttgttctttgatcaggatctcttgtttgtcgaaaccgataaaagagaataccagcctatgatagggctccattttgattttaaatttaccgtctatatcagtgatagcacctaagcccggaacgtctttgataattacgtttacgccaattaatggttctccactttcgtctgttacaattcctttaacttctattttgtttgttactaactcagtctgattatcctgagcatacagactgaatgcgtagcagaataggagaagtaagttaaaatatatttttttcattagaaatgtgtttttatagttattctatagaaatagtacgaatactgtggttttctctgtcggctatatagaaagtctgtgtttcctcgtcataagcaataccgcatggattatcgaaacgtgcttctgtttttaattctccgtcaatatttccatgtacattaccatcagaagaaatactgcctcttcccgcaaagagagaaactgtgccgtcaggggtgattttgaagatacagtgatttcctttgtcgcaaacataatagtcataaatattcccgtccggacgagggtttttaatatattcttcattttttacaaatgttccttgataaggttcttgaaaacgagcgcttgaacctggagataggctatatccagcttcgccttccttgccgacaaaagtggttggtttctgaaactctttggttgtttcatcgtattgggatactaagatacagttgcgtcctgtgatatacataaatcttccatccggatggatgcacatataagtaccgaaatcactgttctcatatgtaccaaatatttcttttccaactttgtttccggttatagggtcatcaactgccttttgaagtcctcctttccaataggtattgtaataaagtgatttgtttcgtgcacaatatacattgtggtatcctgtgcggtcatatacataaggatgagctttccggaattcttcagaacgcaaaatgtaggcgatttcacgtctatctttgttattttgtccatggtcatctgatatgaaaagtgtatcccctgttgcgtcaaaagacatatattgcatattgttaaatcctccttgaccattggtgagaagcgtggatacattttctttttctaagttaattttgcgaacaggaccaccttttccgtttataatcaaacttttttcgattccgaatgtgtctaacaatagccattccggtttcccaaatcttgctgttgcaaaatctccgtctacgtcagatgaatttccgttttcatcttcacttcccaagagtgtgcctacggaaggctgtgaaatatatttgaatttcttttcaaattcatagactaccggttcggctttcccatcagcgctttcaattttaattttgatattaccttcgaaagctttaggtggaaccatgcaatagatttcattgttagtgcatccgatggtggtggtaaactgattaccgatcgtgatatgaattttagaagggtcacttccgaaattgtcaccatagatgtgaatttgcgtacgcagacttcctttatcaggagtgaaatctgcaaatgttacaggtttggatggatcgtatccactggttccgatgttgtcatccttacagctgctaaagcatactgctaataacaggaataatgtctccgcaatatggagacattttctttcatgtgtttttcttttcatatgaaaaaatggttgagattagaactttgtttcattttattttttagaagaaaatatttgttttataattttatttcgatgccttctgtcagatcaccgctggcgtggtaaattccttgttctgtgataactttgacaactgccatattgttattttcagttttatatttacctttttgatctgcaagccttactataactgtattgccgtctttttcagcagtgaatgtttgttggctataatcaccttttttgaatgtccaaccgtctcctgcatcccaatacatggtcccttttgcttgtccttgactgtctaggcatacgagaagagtcagaggatctaatgatttttcattcgtattttggataatttttccagtgggaacaattgatccaccacgtaattttattttggcctgatatttattttgcttatcaccttctacgagtgataattctctccatattcctttgggaaggttggggtgattggcgaaagccggaatgatcagtaaatcgtctccaataaggaaagcttcttcttctgcacgtaaggacaaatctttcgggtcggcaaagaaaaccgggcgcataataggcatgccatttgttgaagcttcatgcaggagtgtatagaagtaagggagcagtatatatctgcgttctaaggctatgcgtgatgcgtcttctatctcttttccgaatgcccaaggttctttgttgttcgttccggcacaagcatgacctcttgcaaatggatagaaagctccaaatccaatccaatttccaaataagtctgcatttgcattaaataagaatccacctatatctgcaccactaaatggttgtccggacaagcccaaagtcaacgacataggtacggacattttcagatgttcccagctggaaccattgtccccggtccatgttgcggcatatcgttgacctccgaggaaattggatcgtgttaaaatgaaaggacgtttttccggacggacatccatgattccctcccttgatgcttttaccatcaggaatccgtacacattgtgatattgaagatgagttcctgccggtatttttccgcctccacgatgaaagttgttttctggcattgtcttattaggagtatcgttaatctgaggctcgtttacatcattccatactccatctactccttgtgctaagaagtctttatatagactcctccaccacttattggctttaggataagtgaaatctggaaatgctgccgctcctggccaggcgtcgcctgtgaaatttttgccatctgcggtttttacccaaatgtcattttctgttcctgatttatatacgaaatagtcgggatcaactttagctcctggatcaatcatccacgcagagtgaaagccacgtatgtgaagatcgcgattcacggcttttggatttggaaaggttgtcggattaaatgtgaaaatacgatatccatccatataatcgatatccatccagatgacgtcacatgggatttttttttgtctgaaagtatctgctatttcaatgacacgattggcaggggtatatgagaatcgggattgttgatagcctaatgcccatctgggaatcattggcatagtgccggtcagttcggaaagaccacggacaacagcttgtggagaatctctgtcaataatgaatacgcgaaaaggaacgccttcactttttaattcaattttctgatttgtacagctgagttcagctttccagcttgtatcaaatagaataccgaaagctgttccgtcttttcgtactcccatcatccatggatgtgactgataaagacgttttccattatcaactccataagctccggaatctgtgttccataatttaatggtttttccatttcttaaaagtgggccggtgacttcaccaccaccatagatacttgtaccttccggaatacttaatgaggcatttgctttaccgtttgttgatgtgaagtcaggaatgagctcccagttgggaggaagtgcaccttgttcacgcggctctttatcaatagcgaaagaaggtattgactttgcgtcataccctgcgggaatgaattttgcaattctgtcaccaaccatgacacttttggtaatatcgactttctgcgtaaaggcactagcaaataaaggtaatgtggtgaataaataaattactgctgttttaatacaaatgtatttcatgttttcttttaattgattatttttgaatgttgatttactattaaatactatttaacaagtcagtctttccttcattgacaagttttagaatcaattctccgaataatgtgttttgccaagcgaaccagacacgtgtgaaattggtaggatcgtctttgtgaaaggattcatgtataaaacctgttcctgcatctgtctctattagtattttgatacattgtttgatttcttgatcgttttgactggtgaaaagctttcatcataatactcataggccatatcatgtcataaccaatgtgggggccaccgataccttcaccggctttacttttgaagaaatatggattgtctttactccatacgaaacggcgagtattttgataaatgggatcatttatgtctaaatctcctaaataaggcatccccaaaagacttggggcatttgcgtcatccattaataaatgattaccgaatccgtctacctcgaatgcatagattgtgctgtatttagggtgattataggttgcatattgttttaatgcaatttccacttcttgggctaaatccaaacattgctttgccaattctaatcgttggttcaccgattccaatatttctgtagctttccgaagtgaagacacggtgaaaaagctggaaggaactaaaaattggaatgttgtagcatcatctgaaggacgaaaagcggaagctattaatccgataggattaaccggtgagccaagtccattattattcaatgtgtcaagagcacgttctgtttttctttgaaatttataatgacctgttccattttttctctgttgctctttaaatgtttttaggatattgagcacagcctgtatccattcattgtcgaaaatgctggcatctccagtttctttccagtattggcatgctaaacgaataggataacaaagagaattaatttcccatttacgttcgtgtaattcaggtttcatatttgttagatctgtcatccattctccacttttggggccatcattgaatgcattggcataaggatcaatgtttatgcatttgaattgtcggcggattacgccttcaagcattttttttagctttgggtctttatttgctaattggatatagggccatacttgggctcccgaatcgcgaagccgcatggcatgaatatcatcggtatatacaaaggtgtcaggtttatcatcaattgtacgataatgtacagttgtttccaaagtgttcggaaagcagttctcgaacatattggctaattttctatttgtcagtagtttttttattttaattatctctgcttctacagcttcggaggtatataaacggtcttttaagacaggtcgctggcttttatattttttatttactaccgctgtattgcaaattattgtattgtcttttgggcaagtaagggtaaatgcgttgatgttacttcctccaataaggaatgctgttgtagctacataaattcgtatgtttttcattcttcttaatttttgcaatagttattttagagaatattattggatagctgcaagacgagcatacatttctactattgcagcttgtgtcagtaaccactttttgttatctttatttttaccgcttaggtctgtattgaataatcctttattatctctggcgttattccatgcgtgattcaaacttttattgaaggcattgatataggttttatttttgtcaatatggtaaagttctatgaaacctcttaacattacagcagtaaaccaaatgtcaccttgtttcagtattttaaagttttctcctgttgtagtcgtgaagtctgtaaagaagtaattatagcattctttagctacattttgtgcttcttttaagtaaattggattttgggttagttgataaagcagagcagcagattgcatcatttgtccgctattataagcgaacttggctttccctatttttccatcgagacgaatattgtcgaaatagagataatctgttgaatcttgtaaattcttttgtgtccattcgtataaatcttttccttgtttgaagtaaacactgtcattagtcgctttaaacaatttaaaggctaatacggagccaggagcatttgaacaggtgtttttggactctttcttttgttcacaccaataaatgcctccacctaataaattatcagttccactttctatgaatttccatattaattgagccttatctagatatttttgctctccggttatctgatagatatcagtgaagtcgatgcctaaccatacattatcatcataaaaacggtcagatgccggagcggtttgtatatatgatgaataagcattgggagttctttgggtgtcgaagtattcttccaatcctggtaatactcgtttatctaatagcctcaaatattttttgtcatgagtagcttcgaataatgcgtttactgctgaaaaagtacccgagtacggccataaatatgaaaattgattgggaatgttcgtttgttctattgatgccagataagtaacttcgtactgttcatcaaaagggtaattttcgtgaagcaggtgagaatcctttatcgaataattttgataaagagagcctaatgtttcttgtgctttttccaaatttgaaacagagtcggtttgtttagttgaggcacaaccaactaaagagatagtgcaagctatggctaataaaaaatgtgatgctttcatggtgatttatttttttattaactagacatcctatatttattaatgaaagcgcgtcaaaactttttaattattaactttgtagtttgacacgctttttgacttatatattacctatataaaaactgtcattctaatagtcttaatttgatgctgcaaatttatctatgttaatttgaagtaatatacgaatatgtgacataaatgttttcttagagctaaatgtcataaaaatgaatatgaatgtctataaaacgtacatttattccatatgaatatgtgatgtactgaagttttttatacactttttggacgtttctctaattttctatatctttccaacgatttattatatcttgaattaaacctgaagaattatatgaaaaagcacggtgattggatgaaagaaaccgtttgtgcgggacattttttatttttgttaatttcctttcttttgataggggcagatatggaagcttcgtatagccttcgacagttttctagtaagaacggattatccaacagtgctatcctttcaatgtgtcaggataggcgtggggtgatatggattggctcatgtgatggtctgaatgtgtatgatggtacttatttggggctgtataaacctgttgacatacataatggtttttccggtaatctgatagaacgtataattgaagcggataatgatgtgctatggatacaaactaattatgggctcgatcgttttgacatacgtcggcaaacaatacaaagtttcagggattttaagtatgtaaatcacatggctttgagtccacaagatgatttttttataatcaaggatgatggttatatttattattatattcccggacaagataaattttccaaacttgatacagagaagatacattttgaggaagtacagcaaatggctattgataattctggaattctctggatcttttcttcaaataatgataatcggagttatgtaatagagaaacagaaagaccggataaagttgattccttgtagtggtttaaatcatctgacaaagttgttatggacatttattgatggtgattccctattttttatagatgatacttatgcgttttatgagtatgatttgaataatcgtaagacatattttgtagcagatttgggagaagagattttgactcgaggagaagtatcttccattataaagcataaagctgattatttcatcggttttaaaagtagtgggttgcttaagttagagtatataccaaattcaaaggtaaaatatagctttcagtcaatcaatattcaatcaggaatattctgtcttatgaaagatcggtttcaggatattgtgtggataggtgcagatggtcaagggctatatatgtattttacaaacgagtattctattggtaatgtgcttttagatataccggaatatcggatgaataatcctgtccgtgcattgtttcttgactatgaacaaacattatgggtaggtacaaaaggcgggggaattttgaagatgatggactttcattctcatatggaaacgttctcccggacagaaagagtattgaccggtaacagtgctttagtagataattctgtctatagttttgctccgagtcggcaaaaaattttgtggattgggacagagagtggacttaattattattcgtatcgcaataggcggatagaaaaatttcctgtcattgcagatggcaaaattgtaaaatatgtacactctatccgtgaagtgaatgatagtacattatgggtggtttctgcaggcgaaggtattgtgaaaatcattttggatactacctcatttttacctaaagtgaaatctgcccgtcgctttacattggatggtgggaagagaaactctaattatttctttgtctcttttcaggagaatgactcaatcctttggtttggcaatcgtggatatggtgcatataagatgaatatacacaccaaccagttgatttcctgccgcattgataatagtgtaaagaatcagactgtgaatgatatctttgctattcacaagaatgatgaaggatattggtttggtaccagtttcggattgacccgtttgtatcagggggaatatagagtatataatgaaatggatgggtttcctaacaatacgattcatggtatattggaagggaagaacaataatttatggcttagcaccaatcaaggattggtaaggtttaacattcgtgagaatacagttcaggcatatcggcaacaaggggatttgcaggttattgaatttagtgacggtgctttttttaaagattcgcaaactggtacattattttttggcggtacaaacggatttgtaacaatcattgaaaataattctttttcggaagagtatatgcctcctttgtattttaaccgtctttctatttttggaaaggaatataatatcaatgattttctggagggaatggaacaaaagactttagtattggattatagtcagaatttctttaatctttctttttgggctgtggattatattaatggcaacaactatacttactcgtataaaatagacgggctaagtgatagttggattgagaatggattttctacggtagctgttttttctaacttgtctcctggtgaatatactttacgggtgaaataccggagtaatattacaggcaaagaaagtaactcctattcattgctaattcgcattactcctccttggtatatgactttctatgcgtatgttttttattttttgttgttagtcagtttgatggcgggaggaatttggatgatgataagccgttatcgtagaaaacgaaatgcaatgattgaacagatgaatcgtcagcaacgtgaagaattgtatgaagtgaaactacgtttttttactaatattactcatgaattctgtactccgctgactttgattaatggtccgtgtgaaaaaatcctgtcgtattgccattcggatacttatattcataaatatgcttccatgatccagcaaaatgctttaaagttgaatgcgctgatattagagctgatagaatttcgacggttggaaacgggaaataaacttttaaatataaaacgtgttcctgttgcggagcagatgagatctattgctgaatcatttactgaactggcggaaagtcaggaattggattatcgtttacagatagacgaaaatattttttggaatacggatgttagttgtttaaataaaattgccaataatctgatttcaaatgctttcaaatatactccggaaaaagggataattaaggtggaattgtcgataaaggaagaacagctttgcatccgtatttccaatagtggaaaaggaattaaggaagtcgacttgccgaagatatttgaccgatacaagattctggataattttgaggtacagaataagaaaggtatttcaccacgtaatggtttagggctggctatttgccacagtatggtgaatctgttgaatgggcagattcgtgtttcaagtgttccgaatgagatgacaacttttgaggtattgttgccatctatggaaattacaattgaaaatactgatacaaagattacggaagttccggtttcggtattggatgaacatttggttgaacttaagaatacgccgacagaatacgataagaataaacaaattatcatgattattgatgacgatccttccatgttgtggtttgtgacagaaatatttgtcgattcatacaatgtcatatcattgagcagtgcggaagaggcattgcaacagttggcagtccaattaccggatttgattatttcagatgtaatgatgtccggtatggatggtatgtcatttgccaaaaggataaagtccgataaagtattaagtcatattcccttgattctgctttcggcgcttaatgatattgatgagcagacgagaggaattgaatctggtgccgaggcttatattacgaagccttttaatgtggaatatcttgagaatgttgttaaaagattgttgcaacgtggagaagaactgaaagaatattatagatctgtcttgagtgcatttgaattggaagacgggcatttcttacataaagaagataaatcattctttgaaaagatgatagcggttattgatagtcatgtccaggatacagatttgtccgttgaattactcagtaattcattgggatatagtacacggcaattttatcggaagttgaaaaatattacagaaaagacgccagcagacattatcagagagtatcgtctgactattgtagaacgcctgctattaacaacgcagctttccattgaagaaattatggatcggactggattctcgaatcgaggaactttttataaggtatttgctcaaaagtttggaatgactcccagacaatatcgatcttataaagaaatggatattaagcctgtttcagctgatgatttgaagacaaataaatagcagtacgctattgccataatggcggcatttgtacaggatgccgtcgttatggcaaagtatacagctactatgggatattcctaaaataataaaatttaaggcaactacttcattgcgaattagttgccttttttgtatctttaagcattccccccaaaaaacggtttgacggccaaaacgggggtaatctaaaataaaaacacatggtaaagatacaaaaaatctcagaaatcgaaccttgtttaggttttaccgagttcgatatgcttaaaaaatatcgtcaaagttttgcaacgagtgaattaggtcgactccattctctattccctttctcggaactggcccgacaaatgcatttgaagtcctctgctttgggtcgtaaaagttatttttctcccgaaggtaaaatagccttgatggtcttgaagtcctataccaacttttccgatgcacaactgattgagcatttaaacggtaatattcattaccagttgttttgtggtgtccagattgatccgcttcatccactaaccaatcctaaaatcgttagtgcaattcgtcaggaactagcgaatcgccttgatgttgagtccctccagttcattcttgccgagcattggaaaccttatcttgagaaccttcatgtctgtatgaccgatgccacctgttatgaaagtcacctgcgttttcctactgatgccaaactcttatgggaaggtattgtatggcttcatcgtcatctgtgcaaacattgccgtacattgcacatacaacgtccccgtaacaagtatcttgatgtacgccgtgcctatcttgcttatagcaaactgcgtaaacgcaggaaatcacagactcgtatgattacacgaaggttacttcaattattggaaaagttacttgaccagctggagcagcttcattcatcctacaggaacaggcttgcactatcctctgattaccaaagacgtttctcggtcatacagacagtccttgagcaagggaagaatttatttgcaggcaaaaaagtgtccaaccgtatcgtgagtatcgaccggcattaccttcgccccattatcagaggcaaggaaaccaaatccgttgaattcggagccaaagtcaacaatatacagatagacggaatctcctttatagaacatatctcctttaaggcttttaacgaaggagtacgtttgaaagactgtattcatctgcaacaacaactgaccggggttagggttaaggcgcttgcggcggattcaatctatgccaataatgccaaccggaaattttgtacaaaatatcatataagtacttcctttaagcgtaagggcagagctgccaaagatgagccgcttcggagaatcttacggtcggaactcagccgcgaaagagctacccgcctggaaggaagttttggaacgcagaaacaacattactcactggccaggataaaagctagaaacaggaaaacggaagtactttggattttctttgggatacatacagccaatgcggtatgtatgatagaaaaggtcgaaaagaaaaaaagaaaggcagcataatctgactaaaataacaggaaaaacaggagaggttttaacttcccctaaaaaagacatgtacataatgcatgggtgggaaggaaaaaacaagaatatgtaaacaatattctacaaaaaagatagaagactgggagagttgaacgaaaaaatcaagagaaaagctttgctttacgtgagcttttctcttgattttttagaaagaggaacatttactgaatatccctactatgatttcttcggttttctacgtgcccatctctcttcactaaagtcaggctctgtatctttgaagaatgcttgccagtcatctttctttttcggtccgcgggcctccgaatatcctcgttctgcacggcttggcttttccttcttgccggattttgaacttttggcagaagcattcttagattttctgtccttattctcattgcgtgaagcgcgttcatcacttttattattgaatcgtttaccgcctttgcgttcgcccgaaccgttctcactctctttgcccccttcttcgttggatacttcaacaataactttacgaccattccatttggtgcgatttagcgctttaataacacttaccatttctttctccggtacttcaaagaaggagaaattctgcatcatatcaatgcgtccaagctcaatacgtccgcgtgtattactgttcagtagtccgataaggtcggttgggaaaaagctatccgtttttcccaaattgataaacagacggttgaagcctggagcagctttccgacttcttttctcaaaagctccctcttttctattcccttttccgctacgttcaccacggctttcaagggtcggttgttcaatttccgggcgattacggtaatattcagcgaaacggttgaactcatgcgaaaccatacgtttaatcaagtcttccttgcttaaccattccagtttgcggtaaatatccggcatgaactcggcaatctcttcctcattgactttcaccttttcaagttcgtcaatcactttcagcaactgcttctgacagattccggctgccgtcggcatttcgcccggaatgaattttttgccgataatgcgctctatctcgcgcatctttcctttctcgcgaaggttgatgatagcgatagaagtaccagtctttccggcacgtcccgtacgaccgctacggtgggtataactttccgtgtcatccggcaatccgtaattgatgacatgagtcaggtcgtccacgtccagaccacgggcagctacgtccgtagcgacaagcagttgcaagttgcgaatacggaatttctgcattacagcatcgcgttgcgcctgcgaaagttcaccgtgcagtgaatcggcgttataaccctcctgcatcagtttgtctgcaatctcttgagtttccttacgtgtgcggcagaagatgataccgtagatctgcggataatagtcaacgatgcgtttcagcgcttcgtatttatctttggcatgcaccgtataaacgacgtgtttcacattactggtactttcgtttttgcggccgattgtgatttcctttgcattccggagataattttttgaaatacgtgcgatttccgggctcatggttgccgaaaaaagtaatgtattacgttccttgggtacatcggcaagaatagcgttgatactttccgtaaatcccatgttcagcatctcgtccgcttcgtccatcacaacattgcggatggtcgatagagatacggttttgcgttccatcaaatccagcaaacgtccgggagtggcgacaatgatatgtactccccttttcaagctgcgtatctgactgtcgatggaagaaccaccatatacaggcagcactttcagtccgtcaatgtatttggaatagtcgttcagatctcctgctatctggaggcaaagctcacgggtagggcagaggataagcgattgtggaattctgttctttacgtcaatctgttggagtaagggtaaaccgaatgcggctgttttacctgttcctgtctgtgcaagagctactacatcattattttctcctaaaaggtacggaatcacttcctcttgtaccggcatgggattctcgtatcccatttcttcaattgctctacgtatctccggagaaacgccaagctcttcaaatgtcttcattaaatctctgtatatcttttatttcggctgcaaagatagtcaatttattaacaatatgctgcgtaactgccttatttcttctgttgaaagtccgattcctttctccaaatagccctgtatgcttccatattctgactcgatttggtctttggcggcattcagaaagtcttctttagccgagtaaatggtggtaattgcttcctgtgaatttgccggtaactcgtaggcatattttgaagctttgggaatgttgaaataatcattacttaaacgataatcggacataatcacgtcttcattgacccctaatgcggcaagcagcaaggctgatactacccctgtccgtccttttccggatgtacaatgaatcacagccggataacagtccggattgagaagtatgtcgaacacttctctgaactctttttggtaatttgctactaatttccggttcatacgttctaccaaccggtaaatcgtgtcgctttttattttctctttccggattccttgcaggatactttccatatttcctgtcgggatggggatatggactattctaaattccttatcatccagttgcgggtaattgtggagttcttcttcggaacggagatctatgatagtgcgtatgcccatatttttgagttcacggcgcgaaccgggagaaatgctgtctatctgtgcagaacgatagagcatcccccaactgatcattttccctgtatcggtagatttatatcctcccagatcgcgaaagttctgtacgccgggaatattgacattgcgggtagctactctgacccggtatttgttgttgaataccatcatatagtaatagcgttgggaaggatcttcggtgatgattgtcattttcccgtcggagatattactcattgccacaggagattcttcaggaatcaatgtgggggatgtggaagcatagacttgtacctgtcctttcagcaagggggctgtttcccatttgatgacactgtttcctacgttattttcttcacataccactgatatggccggtgaggtgccggaacaggaggaaagccccagtagaatggtaagccaacttaacaggttcttgtacatgttttttttgtctgagtaaatcatatacgcaaagttaggaattattggcagatgtggtaattcctttgcgataattagtcaatgttaatagtaatttacgtgttgaaaaagggcactctttcataacgaaaaagtgccctgaattgaatggctatcttataatttattttactgtatgctgttcaatagatctattttcccttcgttgattaactttaaaatgagttcaccaaatagcgtgttttgccatgcaaaccaggcgcgtgtgaagtttttagggtcatctttatggaaagattcgtgcatgaatcctgttcctgcgtctgtatctatcagcatttttatgcaagacttaatctcctgatcgtcctgactggtgaatgccttcatcatgatactcataggccataccatatcataaccgatgtgaggtcctccaataccttctcctgcctttcctttgaagaagtaggggttgtctttgctccatacaaaacgacgtgtgttttgataaataggatcgttaatgtctacatcccctagataaggcattgccagcagacttggtacgttggcgtcgtccattaagagatgatttccgaatccgtctacttcgaaagcatagattgtaccatatttaggatgattgtaagttgcatatttttttaatgcagcttccacttctaatgccaaatctgtgcattgtttcgccagactggtgtttttgtttacaacattcagaatttccgcagctttctttagagaagaaacagcgaagaaattagacggtacgaggaactgtaaagttgtcgcatcgtcagacggacggaaggctgaaacaatgagtccgacaggattcacaggagcacctaaaccgttgttgtttaatgtatcgagtgcacgttccgttttgcgttgaaatttataaggtcctactccctctttgcgctgttgttccttgaaagttgtcagtatgttggtgatagcctgtatccattcattatcaaagatgcttgcatcaccggtttctttccaatattgataggccagacgtagtgggtaacatagagaatctatttcccatttacgttcgtgcagttccggtttcatgtcggtcaggtcggacatccaatctcctcccacagccccgtcattgaaagcattggcgtatggatcgatatttatacatttaaattgtctgcgtatcactccttcgagcattttcttcaattcggggtctttattcgctaattgtatataaggccaaacctgtgctccggagtcgcgtaaccacatggcatggatatctcctgtgtagacgaaagtatcaggcttaccgtctgttgtacggtaatgaactgttgtctcaagagtatttggaaaacaattctcgaacatccatgccaatttttgattagtaagtagctttttcaccctggtgatttccgcttccacggcttttgatgtaaaaagccgcttgtttacgggtggacgattacttttataagcggcaatttcaactgcttgattaaccacattggtatgatccttagctagaataagttctgtagctttagcaggacctcccattaatagggtggtcgtgatgatacatattccgatatttcttttcttcatatctctattgtttttaagagggttattaaaagtgattattataaatcgattccgcctagtcttccatacatttctatgaaagcagcttgtgttaagagccattttttctcgtttttatctgtaccgctccaatctgtctggaacaagccccgttcatctctggcatgatgccatgcgtaatcaagacttttttggaaatcagttagataagtcttgttatggtctatttgataaagttcaataaaacctcttagcataactgctgtgaaccaaatatttccttttttcagtaattggaacgtttgtccgtctggagaggtgaaatgagtgaagaagtgtttgtgacacgcttctgctatattttgggcatcttccagataacttttctgtttggtaatttgatagagtagggcagctgcttgcatcatttgcccactgttgtaggcaaatttggcacgaccgatttttttgttgagtgagatgttgtcaaagtataaatgatcttttggatcttccagattctttttagtccattcgtataactcttttccttcttttaaataggcatcatcttgagtagcttgaaatagcttgagagcaaatacggctcccggtgcattagaacaagtatttttagattccttcttttgttcgcaccagtagattcctccgccgagtacgtcatctttaccactaaggataaacttccatattagtttagctttctccagataagcttgttttcctgtcatacgataagaatcggtaaaatcgatacctaaccagacgttgtcatcataaaaacgatcggagagaggttgactgctgatataagatgagtaagcgaatggttctcttcgtgtgtcgaaatattcttccaatcctggtagtactttgttttccagaagctttttatatttcttatttccagtgctctccagtaatgcatttactgcagagaatgtgcccgaatacggccaaaggtaggaatattcattgcgtctttttgcttgttcttctgatgccagataagttgccttattgtcttggttaaaaggatagttctcacgtaacagacacgtgttgggtgctgcatagttttggtaaagagcatctagggtctgctgtgctctttctatgttaggatttgcgtttgcaatggtgaaagcacaaataacattaagtaataggccgttcataattttttatttaagtggtgtttatataaatagtaatttgaattagttcgcaggttttattgtgaccctacaaaaatactttatttcggttacttttaaaatggggagtgagcagattgtaaatgattgtttagattatgttgttgataatcagagaatatttggtcagggagtctctgataaatgtaaatgatgctgtatgattaatacactgttatttccggatttgttgtccgattcgagctactttttcttcaaattcattccgatctccatttgctttgatcctcatttttgagcggtaattatagatggtcgataatgagtactgtaagaaatgagctattttcacactgtctgtaattcccagtcggataagtgcgaagatccgcaactcgggtgttaagagtttaccgggtcctggaatgattgcattttccggtaaaagcaatgcgttaaaatcttcgacgaaattcggaaagagatttaggattgctttgtcgaagttattataaaattcagccagatcttcttctgtattgagagaggagtggaggaaagaggttactttctttatatcttcacttttggctattttgagtgctcttttcttaaaattagcaattttactgatataactggtatattgttccatatacagccctacatattcttctttgattttattgttatctgccaatattgagttcatttgttgtatttcgtaaagatgatacgacaaactctcattagcttgttccactttacctttttgttttttcagttgtacggacaggatgaatagcagaatgcagacaatgcataatgcaatgagcaatgccgttatgatgataaatttatgtttctccttttcttgaaatgccttatctatgaaaaggtacatatctgaggcttcgatggtgttaattctcgcattacataggatagcgtcctccattgcatttttcatatatttagatgcccggtctatgtccccactctcaaagatcagcttggctaatatttttaaagagaggttttctctagctccatttaatacatcagaaatggcggatattgcgaaatacttaatcgtattctcacgatcatttttaccttgataggcagatgccagagaatatgctatgattccggcatttcttgaatagggtgtataactttgataagtgctgtccagtatatgaatagcatcatcatactttttatggaaaagaagagttggcgcggtcataaaagctcgtacattcgttgggatttctttgcattggagcagcgaatcgcgatagatttgtgctatcagatcattttcttgtgaatcgtcctcgttggaagcaaaagctttctggtgattgtagatcgtgacctgtccaagaaaatattcggctttgagtctaggagatagttgctcttgttgcatcgaattggtaatcgccagagcttctttgaaaaagcccatcgaagataatattcttgaataatccagtttagcttcaattaaaagttctttgtcattactttcttgagcgaacctgttcatgtggatggcataggctaaagcggaatctttttggaaagatgaatactcaaaacaaagagactgtgctatcccaactttctttcgaatatccttggattggcttaatattattttcaggctgtctatctgtctttgcttttgttgggtataactagctttgttttgtagagatttatctaatacttttaacaatgtttttacttcatcgtttgcttttgctggtaaactgatgaagataaagattatcaatagaggtaaaataaatcttttcatatcttaagtaagattgcttattgaatatggttgtttgcaaagataaggaaatccatattaggttaaggttgacagattaacttaatatggattttatgaaaagcaggatttcgccggatgaactacttatatccaaatccttatttgtaatatcatttgtatcttcttgcaaactccaccgaaaccgaattgctgaaactttggcaaacttcagcggcaaagtcttttccgcactgaatgattttattccagatctcttcattcaagttgttcaaatcgcggtaacggacatcatatttaagcaatccgtagatcaggcctgcgttaaagttatcaccggctccaatggtgctgacggcttccaacggctctatcggatattctttgctgaccaggttggtacgcaaagatactttgtcgccaccggcggtgcagacaaaacggggacagtagaactttatcttatctttgtatatcttgtctacgtcctgcatattatacatgtagaggaagtcctccaaggaaccgcgcacaatatctgcatattccagattctcgataatggtaggggccagtttcatcgcttcattcttgtgtgaagaacggaagttcggatcatagtagataatggctctcttctcacgcgcctgatccaataactcgagaatcttatcccgcaataccggattcaaggcatagtatgagcctaccatgacaatatcatcctcctccaatttgggaaacagtacatccagacgttgcttcggatagtccttgtaaaagatatattcagcgtcactttgctcattgaggaaagcgagcgatataggtgatttgccatcgggaaatacattcacatgattggttgggatgttgttttcacgcatgaattgcaggatgatattccctacacggtcattgccggtctcactgatgaaaccgacgttgactcccatccttcctaaggacacgatgccgttgaacacggagcctcccggcacggctgcggaaggctgttctcctcgaaagatgatatcgaggatggtctctccgataccgattacttttcgcatagtgaccttgatttttctcccaggtaaccgccgtggtggcgtttagaatattcttctatggtgaattgggtctttttcatggtctgtaccactaagatgtcaccgatgacggtcatcgcggttgtcgaggtggtaggagtcattcctaatgtacagacttcagccggttttccggtgctcaggcagacatccgattcttgtgccaacggactgtccggatttccggtgattacgatgaacttcaagtccggatcgaggttatgtgccaaccgggtcagttcgacaatctcacgtgtcttgccggaattggagattaataaaagcaagtcgttcttctgcaagattcccaagtcgccgtgttgcgcttcgctggggtgcaggaaaacggacggaataccggtggaacagaaagtagtagcaatgttcatcgcaatttgtccggcctttcccatgccggaagtaaccagtttcccgtttttctgatgtacttgctctacaatcagttgtatagctttctcgtatgcgtctgttacagggatgttgagcacggcttgtgcttcctgttgcaatagttgtttgatggagtctatcatatgatcagtttattttttcttttaattcttccggcgtgtttgctatttcgtaataggtggaaaaaggctgtcgggcaaatcctttatcttctaatgttttgagtgttttcaacagttcgtcatagaaaccgtattcgttgtagaagatgacttttttccggtggtatccgatggaagcggcagccattacatggaatatctcgtccaatgtgcctatgcctcccggcaatgctaccaggatatccgatttctctgtcatgatatctttccgctcactaaggttgtgggtatggatcacttcatcaaggaacgtgcagacacgtcctttctcttccagtttggtaggaactacaccgattactttaccgccgttttccttcacggcacgcgctacgcattccataagtccgagatcggctcctccataaatcaacgttttacctgttttacccatccactcaccgatttggcgggcactttcaaagtacattttgtcaatgtttgcggcggcagaacagaatattcctatcttttccatatacgttgttactgttatagtccacaaatatctgcaattttctataaacagcaataagttttattgtatttttgcggcataattcaataaggaagtagaaaacaatgcattataacgaatatacactaccgaatggtcttcgtattatccatgaaccgactctctcgaaagtagcttattgtggttttgccatcgacgccggaacacgagacgaggcggagcacgaacaggggatggctcattttgtggagcatctcatctttaaggggacggagaagcggaaagcctggcatatccttaaccggatggagaatgtaggcggcgacttgaatgcctacaccaataaagaagaaacggtagtctattccgctttcctgaccgaacatctggaacgggcgctcgaattgctaggggatattgtgtttcattccacttttccccaacacgagattgagaaggaaacggaggttatcattgatgaaatccaatcatacgaagacactccgtcggaattgatattcgatgatttcgaggatatgattttccgtaaccacccgttggggaggaacatcctgggtaagccggaactgttgcgtagctttcgcaccgaagatgtcctttcgtttacgtgccggttctatcagccgggaaatatggtattcttcgttcaagggcaatatgacttcagaagaataatccgtctggcggagaagtatctgtcggatgtccctgccggagaggtaaacagccgacgtgtgcctcctccgctttatgctcccgagcatttgatggtcgctaaggatacgcatcaggctcatgtgatgattggcagtcgtggatacaatgcgtatgacgataagcgtacggcgctttatttgctgaacaatattcttggcggtcccggtatgaacagcaagctgaatgtatctctgcgcgaacgtaggggattggtatataatgtcgagtccaatctgacttcttacaccgatacgggagctttctgtatctacttcggcactgatgttgaagatatggatacctgtttgaaactgacttataaggagttgaagcggatgcgggatacgaagatgacttcgtcccagttggcggcggccaagaagcaactgatagggcaaataggagtggcttcggacaattttgagaataatgctttgggaatggcgaaaacctatttgcattatcacaaatacgagtcgtccgagcttgtctttaaacgcatagaagctttgacggcggaacagttgttggaggtgtccaatgaaatgtttgcagaggaatatttgtccacgttgatttacaaataattagtaggcggtcttgcttttcgctgattaaattcgtatctttacagattttattcttttctctaaagagatgtcactctataaggtgccgtttgtcaccctataaagtgccttttgtccctttgtaaggtgccgatggtcaccttgcaaggtgacgacttcccggctacataaaaccgcactgttttctgcacagaacattcttattctctgcactgaagagtcctaaacatagtaagaaaagaattatggcttattacaatttgaagaaaaaaccgtcccttaccacgaaagagggtgagaaggaaacaatgtatgccgacattgtgtatagcggaacgattacggcagagcgtcttatccggacagtggcccagagaaccggtttcaaggaggggatgatagaaggaatcctttccgagttgcagaacgagacgttggagtacctgggtgaaggataccgcgtcgaattgggagaattcggtttcttttcagccaaagtaaagtcccgcctggtggagaacaagaatgacttgcgttcaaattcagtttcctttgatggagtgaatttccgtgcatccaagtctttccgtaccggtatcaggggagatttggaacgtaggagatgtatcggtttccgtacttcgaaagagtggaacagggagcaactggaacaaattgtattgcagcatatccggaagcatgggttcatcacaagggctacttatactgaactcacaggtcgcttgaagaactccgcgcttgccgacctcaaatcttttgcggccgaagggattatcaagagagtgggacgtggcaatcagatgcattttattgtgccgctcgttgacgatctgtagcttgtgtgcgtatttgcggaacggatgaagagtgattctaattaaaaaagagggatgctacttgttttcgtctgtataattcgtatttttgtagcagatcagatacgtgtgtgataacaatctaaaaacagaagcagtatgttggtaacgggtagaaaactccccatcgggattcagactttcgaggatattcgcaatgacgggtatctgtatgtggacaaaacggcattgatgtggactatagcgaacattggcaagcctttctttttaagtcgtccgcgccggttcggaaaaagtctgttgatatctacgttcgaagcctacttcaaggggagacgtgagctttttacggggtttgctgtggaagagttgaagaagaagtgggaagagcatccagtgcttcatcttgacttgaatgcccgtaagtacaccactccggcggatttggatgctattttaaatcagcacttagaacgatgggaagcggtgtatggagaagaaaagcgtgaccgtgcttcggaagaacgttttgcttatgtcatccgtcgtgcttccgaacagacgggcaagggtgttgtggtattggtggatgagtatgataagccattgttgcaggccattcagaatgaacctcttcttgagtcttatcgttctaccttaaaggctttttacggggtattgaagagtgcggaccgttacctccgttttgcgtttctgaccggtgtcacaaagttttctcaagttagtgtgttcagtgacttgaatcagttgaatagccagactgaacgtcattatcaagtcatcatatatttaatattcaagctgatggggcagttcacccaagcggaggtccatagctcacggggtcgtgcagacgctgttgtaaagactcctaagtttgtttatgtattcgagtttaagttgaaaggaactgccggacagacactgcaacagattgaagagaaaggctatacgcttccttatgcggcggagggtcggcaagtgataaaagtcggtgtggagttcagtgcggaaaagcggaatgtggagcgctggatggtggaagaagaaaaataactgaataactaacttttgtattttaaagcttgatactccaatgaaaaagaatagtctgttattccttgtatttctttctttgccgttatatacttgggccgataagactttagattcactcttgaacgtgcttgaccggacgattcaagagcatgagacatacgttgcccaacgtgagttgcgtatcggacatcttaagttattggtaaatggaatagaggtcaagtcagcggaacattacaacttgaataatcagatatacaaagaatacagagcttttatctgcgattccgccattcattatttgaatgagaatatacggattgcagagtatctgcatgatacagaccggaagatagaaagcaagctgcagctctcattactactatcttcgacggggatgtatacagagtctatcgacgttttggagtcggtagaccgtcaggaggtagccgctcgcttaatcccggattattacacttgtttcgatcatgtgtatggagaattgagcgtttatacacaggataaagccctttcgggacattattggagtatctcgcaggcatatagggattctttgtacgccatattgccgcctgcatcggaagaacgtctgttgatgcgtgaagcgttgcttcgtgaccaacatcaatatgaggaagccttgaaaataaatgacctccgattggcggagatggagccgtatacacctcaatatgcgatggccacttatcatcgttccctcatctacaagtacagtggggatcatctaggggaggagaagaatctctgcatctccgctatttcagatatccgttcggctattaaagatcatgcgtcgctgtggatgcttgcccaacttctttatgaggacggagatatggagcgtgcctatcagtatatgcgtttctcatggaatgcgaccaagttctacaatgcccgtttgcgtagctggcaaagtgctgatgtactttcactgattgacaagacttatcaggcaatgattgaaaagcagaatggtcgtctccagcaatatctgttgcttatcactacattgctggtactgttgatagtggctttgggctatatctatcgtcagatgaagaaacttgcggatgcacgaaaccatcttcaacaggctaacgagcagttaaacggactgaatgaggagttgaggcagatgaacagttgcctgtcctccaccaacatagaactttcagagtccaatcagattaaggaggaatatatcgcgcggtttatcaagctgtgctccacctatattaaccgtttggatgcttatcggcgtatggtgaataagaaagtatccgccggacagatagcggaacttttaaagataacccgttcgcaggatgctcttgacgaagagttggaagagttgtatgccaacttcgatacagcctttctacatctgttccccgatttcgtgaagaagtttaatgacctgctgcaggataatgaacggattgtattgaagaaagacgaactgttgaataccgaattacgtattttcgctttgatacgtctaggcattgaagacagttcacagatcgccgagttccttcgttattcggtgaacacaatctataattaccgtgcaaaagtgaagaacaaaactcgtggctcgagagaggattttgaggatttagtacgaaaaatccgctaatcaaggttgtaaactatccacttttttagactgaagaaaagagagtaagcttttggaaatgaattgtttgccttttaatggtatccacttattgtcccctccttatgaattcgttctcatttctttataattttgacctgtgcttcggaagcaatgagaggaactccattgcggacggacgtttattattaactttaaaattagtacgcatgaaaaagaacaggcgaaaaatcctttcggggagtcgcaagattctctttgctattctggcaatgtttctatcattgagtgcatccgcacaacaaattactgcctccggtcaggtgctggatgcgcagaacgaaccgcttatcggtgttagtgtacaggaaaaaggaacgactaacggtgcgattaccgatctggacggtaacttttcattaaatgttcaacaaaatgccattctggtattctcttatgtgggctataagtcgcaggagatgaaggctacccgtcaaatgaaggtcacacttcaggaagataatgaagtgctcgatgaagtggtggtaatcggttatggctcggtgaaacggaaagatgtgacgacagccatttcttccgtatccaccaaagatctggatatgcgtcccattgtatctgccggacaggccattcagggtaaggcggcaggtgtatcggtcatccagcccaatggtacgccgggaggcgagatgtctatccgtgtgcgtggtactacttcaatgaatggaagtaacgatccgctatatgtagtagacggagtgccggtagacaatatcaagttcctttctccgaatgatattgagagtatgcagatcttgaaagatgcttcttccgcatctatatacggttcgcgtgccgctaacggtgtgattcttattacgacaaaagcaggtgcgacgggaaatgcgaaagtttctctgactgcccagttcggactgaataaagtggccgataaagtggagtccttgaatgcatcacagtacaaagaattgcaggacgagatcggactggtgtctctgcctgacggattgcccgaccgcaccgattggtttgacgagacataccagacagggaagacccagaattatcagattgctgtatccaatggcaacgagaagatgaaatactatctttctgccggatatctgaatgaacaaggtgtgttggatatctcttactacaaacgttataacttccgtgtgaatctcgaaaatcaggttcgtaaatggttgactgttagtgctaatatctcttattccgactatacaagcaatggaggaggcgctatgggtacaggagcgaatcggggaggtgttattctggcggttatcaatactccgacgtatgctccggtttgggacgctttgaacccgaaccaatattataataatttttatggagtgggcaatatcaccaatccactggagaatatggcacgtgcaaagaacaataaagataaagaaaatcgtttattggcttccggtaacgtgttgctgacgattcttcctgagttgaaattcaaatcgacacttactcttgaccgccgtaatgctgtcaatactactttccttgatcctatttccactacttggggacgcaaccaatatggagaggcttcggataatcggaacatgaatacggtcctgacatttgataatgtcttgacttataataagaacttcaaaaagcatggactggaagtcatggtcggttcgtcgtggacggattccgactattcaaacagttggattaacggttctcattatcgtgatgaccagatccagaccttgaatgcagccaataagatttcttgggataataccggaacaggggcttcccaatggggtatcatgtcattcttcggacgtgtagcctataatttcgacagtaagtatctgctgactgccaatatccgtgctgatggttcctctaaactgcatcctgaccatcgctggggggtattcccatcattttctgccgcttggcgtatctcttcagaaaagtttatggaagatctgacttggattgatgacttgaagctgcgtggaggttggggacaaacgggtaaccaatcgggtatcggagactatgcttatctgcaacgttataacatcggtcgtatcgaatggtttaagaaaggtgaggaaggggataagacggattatgccaatgccgtaccgaccatcagtcaggcgaacttacgtacatccgatttaacttgggagacaaccacacagacaaatataggtttggatttgacagtcttgaatggacgtttgacgttcaatgcggactactactataagaaaacaaagaatatgctgatgaatgtatctctgcctgccggtgctgccgcagccacttcgatagccagaaacgaaggtgaaatggtgaacaagggttttgaattttctatcagttcgaagaacttccgtggcggagcatttacttgggatacggatttcaatatttctttcaaccggaataaactgacgaagctggaactgcaaaaagtgtattatgatgcgaagacagcggatgtagtcaatgattatgtcgtacgtaatgagccggggcgtgctttgggaggtttctatggctatattagcgacggtgtggacccggaaaccggtgagttgatgtatcgtgacttgaatcatgatggtaagatctcatcttccgaccgtacttatatcggtgacccgaatccggatttcacttacggtatgaccaacacattctcttggaaaggttttaatctgagtatctttatacaaggttcgtacggaaatgatgtttataacgcttcacgtatcgaaacggaaggtatgtatgatggtaagaatcagtcgacccgcgtgctgggacgctggagaatacccggacagataacggatgtgccgaaagccaattttaaactgttgaattctacttatttcgtggaggatggcagttatctgcggttgaaagacgtctctttgtcatacaacgtgaaaggcaaactcttgaagaaatggggaatcacccgtctgcaaccttattttacagctaccaacctgctgacgtggaccagttactccggtatggatccggaagtgaaccaatggggtaatagcggtacggtgcagggtatcgactggggaacttacccgcattgcagatcatacgtgtttggtattaatgttgaattctaatgaaaggaaagattatgaaactaagaactatattttgtggattgacgtccggtttgttattggggatttcttcctgttcactggattatgagccattagacacctattcggatgtgacagaaggaataacggataacggaacgaagattgtgttcaaggataaggcagctgttgaaagccatctgactacgctttacaatcagatgcgtgatcgtcaggaacattggtatgtggatttgctgctgattgcggattctcattcagacaatgcctatgcaggtactacgggagcggaagttgttccgtttgaaaataattctattgaaggatcgaattctgtattggagcgtgactggaaccggtatttggaggatattgcccgtgccaataagctgatttgcaacatcgacctggtgaaagataattcattgactgccgacgaacgggcacagtataaagcggaagcggagatattccgtgctatgattatgtttgatatggtgcgtctttggggagactttccggtgattacaactgtggcggatgatattacttcggataatattgaagatgtatattcccagtattttcctgagcaaaatacggaacttgaagcttaccaacagattgagaaagatttattggatgctgtgaagtatgcaccggacaatacactgagcaataagacattattcaccaaatcggtggcacgtacattattagctaaaatttatgcagaaaagccgttacgtgactatacgaaggtaatccaatattgtgatgaagtgaaagcggatggcttcgatttggtagaagacttcagcgatttgtttggcatgaacgatgctaatacggatgcgaaagtacgtaatacaaaggaagctattcttgaggcacagtttactcccggagcgggcaattggtgttcgtggatgttcggacgcgatttggtgaactggaataccaacttcacatgggcgaaatgggtaactccgtcacgtgacttgattaatgctttcaagaaagaaggtgatgaggttcgttttaaagagtcggttgtttattatgactgttcgtggagcaattattatccgtcggataattatccgttcatgtataaatgccgttcggccaatagtagtatcataaaatatcgttatgctgatgtgttgttgctgaaggcagaggcattgataatgcaggatacacctgatttggaagcggctgccggtattattgatgaaatacggaaacgtgccggtttggggaaacttccttcatctatccgtgaaaacaagaattccatgattgacgctttgcttaaagaacgtcggttggagctggcttttgaaggacaacggtggtttgatttagtacgtctggacaaggtagaagaagtgatgaatgctgtgtatgcgaaagattcaggacgcaaggcacaggtttatgctttcgataagaactcctatcgcttgcctatcccgcagtcagtaattgatgtgaatgataagattcaacagaatccgggttattaatatattagaaacttaagattatgataaacatgagaaatatagcattgacttttttaggatgcttcaccatattagctgcatgcagcaacagtgacgacgcagaaaaaccggtagcacctgttccaaccggagatgtaacgatttatgcaacgaccaacagcctgacacgtgatttaacccgtgatgcggttaatttcagctcgaaggataacctagcacctacttctatcacgctggatcctacagaacaatatcaaacaatggatggtttcggggcagccataacgggagctacctgctttaatcttttacagatgcagccgacggaccgccatgattttctgaccgaaacattctctgataatagtggtttcgggtttagttatattcgtatttcgattggttgttcggacttttcgttgagcgaatatacttgttgcgatacgaaaggaatagagaactttgctttgcagagtgaagagaaaaactatatcttgccgattctgaaagagattctgtctattaatccttctattaagattattgcagccccctggacttgccctttgtggatgaaggtaaagagtttggaagatcttaccccgctgacgacgtggacaagcggacagctgaatcctgcttattatcaagactatgctacctatttcgtaaaatgggtacaggcatttaaggccgaaggtattgatatttatgctgtgactcctcaaaatgagccattgaatcatggcaattcggcttcgatgtacatgagttgggaagaacagagagactttgtgaaaactgcactcggacctcagttcaaggctgcaggattggatacaaagatttatgcctatgatcataattatgattacagcaatcttgaggcagagaaacagtatccggtcaagatttacggtgatagcgatgcatcccagtatatagccggtgcagcatatcacaattatggcggcgatcgtgaggaactgctggaaatccataaagcttatcccgagaaagaactactgtttacggaaacttctatcggtacatggaatagcggacgtgacttgtcaaagcgattgctggaagatatgaaagaagttgcattgggaacagtgaacaattggtgtaaaggggtgattgtatggaatctgatgcttgataatgaccgtgctcccaatcgtgaaggtggttgccagacttgctatggagcggtggatatcagcaatagtgactataagacaatcattcgtaactcacattattatattattgcccatctttcaagtgtagtgaaaccgggcgcagtacgtatcggtgcatccggctattccgacagcaatattatgtattctgctttcgagaatacggatggtacatacgcctttgttttgatgaataacaatgagaagacaaagaggataactatcagtgatggtaaacgtcattttgcttatgatgttcctggcaagtctgtgacctcttaccgttgggcgaagttgaaataagaaccttaaaagtataaagacatgaataaaagtatctatataatattggcattggtaggaatactggtcatgaattcctgtagtgacgatgaattcctttcgggtaatccggatatggaactcggagctgggaaagtaagtgcgctttatggcgacagtctcccgttcaccattaaggcttcggatgtggatgtacctctttctactttgaaagcgaaacttttttatggagaggaattggtgtcggaaactgtgattcgcaccaagacaagtggtagcgattatacgggcaaagtctttgtgccttattatcccaacgtgattgatggtagggctactttgaagtttgtccttcagaatatccatttcactactacggaaatggagcgggaggttgttttgtcccgaccggacttcccttatgtcactttggttgacgaaatgggtgaagaatatctgatgaagaggcagtctctgtataattatagtgtgaccggtagatttcctcaggatatgaaggcttattttaaaaccccgaaagtcggtgaaaacggtaacgaactgactttcggatgggataatgagaatcagctttcggaagggaagaatgtggatcccatcactttctccggtacggaggcagaaccttatgaggtaactttcaatgttcttacatacgcagtttctccattggtcaatgtattgtttgacggagagaagatgatagcacaggatgcgaatacttatctgatacagaaatcatttactcagggacagtccataatagttgtgggtatagatctggatggctggtggattaatccggattattttaggaaagaatccaatggcacattgactttcttaccggtgaatggcaagtatcgtgtagtagctaatatgaagcagaaatattttagtgtgacccgcatgaacggtgatgaggaggctactctttctgatgacggacatggtgctatttggttaatgggttggggagtcggctctccttcattggatagccagtttgggtggaatatcggaagcaactattgtatgccggaaatttcatcaaagaaatatcagtttaccggagtggcaggccctgaacatggttcatcaataggacagcgtttccgttttgattatataagtgctaagttcttcttccagaatggttatggaggagaattttctcagataacattggcttccggtacagaagcattgttgaagttgacagatagcaaaaattttgaacttgctaatgatgtaaagctggaagagggagcgacctatgtacttactgttgatttgacagccggaaatgataaggcagtaatttctttcaagaagatttcagatggagaggtgaaaccgcaaccgacactagtacagacattgtattttgatttcggtggtaatgaaagtggaactcgcggggaaccgacagtctccccggataataatggaaattactggaataatattattaataatgatggattttatgcaaagaagggctctgtttataccaattttgtaaattcaaggaatgatcagacaggcttttcattgacgttgaattcacgttttacggctaataaagcaggtggtttgacgaatccggataaagacaaattaggtgatttagcagtgattacagccaccggtgattatttcttcttagaaaagttggaagataatggtaactttactctttcgggcttggataaaaataaagggtacaaattttatatgtttgctagtcgagacgcaactcagattcgtacagcacgctacacgatagctggtacaaacgaatgggcaggagaattacaggcggccggcgccgattgtggaggtactgggaagaatcataatgtagagaatatctgtgaatcggattgggtgtatccggatgaagaaggaaagattttgtttacagtctcccgtgcgacaggtgattatatccctttgaatatcatgaaaatggaagaatggtccggcatacgataactatatcatatattaatctataaaaagaagggacatgaaaaaacatatacttttggttatggcactctttggagtgcttactgttgggtcttgcaatgacgatgagcctgttgtttctcccataccgggggaagacgaagaggtagtgatacctgcgccggagcctatcaatcctgtattggtacaaactctttattttgattttggttcggtaggagggggaacgagaggatctcaaactgaaagtccggatgagaacggacactattggaataacatttataataatgatgggatttatgctgctgttaactctgtatttgaaaactttgttaactcggaaggtacttccgtaggctataaactgacgttgaatacccgtttttctactaatggaggttctggcggaggtggtttgttaactcctgacgcagagttgttgaaagattttgccgtatctacagctacagaagattatttctatatagagagtggggagaatggcaataactttaccatttccggcttggataaggagaaggcatataagttctatgcgttcggtagccgaagtgccacagagaaacgtgttgcttattatacgatgtccgggttgaacagttatcaaggtgagttgcagattgccggaacaaatttaggcggagaaggggttaaccagaatattgctaatatctgcgagtccggattagtctatccggatgaagaaggcaccctgacctttgctgtttctcgtagtacgggagcatatatggcaataaatgctttgaagctagaagaatataccgatgtaaaacgtccccaaacatttacttcgttgacaataaccggtagtgcggtagaagaaggagaagtgcctatgcacatgatttctccgacagacaaggtaagtaataagtttgaagcttttttgtcacttcaatcgggtaagttttctttcaagggggtaacatcggagggtgtatctactgatattggaaagggacatgaacctggtgttgtggcgatgaatagttacggtatctcggcagaggtgacaggtccggtatatattgtagtggatatgtcaaagaagagttataccattactccggtagaagaatggagtattgttgggagtgttacggaaggaggttggaatgccggagctggtgtaccgcttgcctatcaaggtaaaggtgtatggggtggacgggtaaaactgaccggacttggtacggcaagtgaccgtgcccgcttcaactttattatgaacaaaagttgggattatacaatgaaacgtatttctgatactcctaatgaagtggctttctccaattctggctattcttccagtgatataaatttgaatcatggtacgtataatatcactttagatctccgtcgtttcgctttctatattgattgtggtgaagaaggtatagatccttttaagatttctgtaatgggatcttctgtcgctaacggacagggggcagacagtaatcatggttatgcctatatgttcggtgaattgcaggacgagcgtttcaagaatcaggagacccgtctgccatggtatacatctggtatttctattggtggaaacagtacattgaatttgttggctcgttacaatgatttgttgtatgactgcggcaagtatgttatcttcggactttctttgggtaatgagggaatacatggggctgccgatcagcaggctatctataatcaattcaaagacaatatgcagactttgattagtaaagcgcgtgaagacggtaaatatcccgtgatgatgaataattatactcgtggagattttgaggagagcgattatagatatgtaaaacagatgaatctgctgattcatgagtgggatcttccttctgtcaatatgttaggtgcaatagataacggtagtggtaaatgggcagacggttatcagaatggtacggatctttatcatccgaatacagaaggacaccgtgaattcctttatgctatggttccttcgttgtttgatgcaatagaagctggtaagactcttcctgcacgtgtctccggaacttcatatactttggcgggaaaggttttagaatttactccggaagaaacagtacatccgtttacaatctcttttaaggtgaaaggtgctacagatggaacgattgccacttttacaaatggtggcaatactatgggaactttgaagattcaggagggaaaggtagtatataactctccatcgcaaggtaaaatagtaggtggaaatgttacggataatcaatggcatgtagtatctttgacacattattatgcacaaggacgtacattgctatacaccgataagagtttagcaggagaattgaacgagagactgactgtaggtaagtttattatcggtgataatagttctacagagggcagagagtacagtgaactgttcttctaccgttcggcaatgaatgaggaagaaataaacaaactttgtgatggaagtatgttgaaatccagtttggaaatctatgctccgttggatggttcgaaatcaacaattgagaatctggctcaaagtatgaatactgtggtagtaaagtctgaataagaatagaaattatatgaatatgaaactcaaagcaatgttacttggcctgtccataatgaccgcattgcctgtctgtgcgcagaaaccggtatatttggatacaaacaagccaatcgaagagcgagtgaaagatgcgttgaaccggatgactcttgaagaaaaggtcaggatgattcatgcacagtctaaatttagttcggcaggcgtaccccgtctcggtattccggaagtatgggctaccgatgggcctcacggtatccgtccggaagtattatgggatgaatggaatcaggcaggatggacaaacgattcttgtattgcttatcccgcactcacatgccttgccgcgacatggaatcccaaaatgtcctacctttatggaaaaagtatcggtgaagaagcacgctaccggaagaaagatattttgttaggccccggtgtgaatatttatcgtacccctttgaacggacgtaattttgaatatatgggcgaagatccttatttgtcttccattatggtagttccttacatcaagggggtacaggaaaacggagtggctgcctgtgtgaaacattatgcgttgaataatcaggagttcaaccggcatacaactaatgttgaagtaagcgaccgtgctctttatgagatatatctgccggcctttaaagctgctgttcagaaagggggaacttggtcgataatgggttcctataacctttatcaaggacaacatggttgccacaataaacgtttgctcaaagacattcttcgggatgaatggggtttcgacggagtagtggtgtctgactggggaggtgtgcatcataccgaacaggccatctataacggtatggatctggagtttggttcgtggacaaacggattatctgccggaacgagaaacgcttacgataattactatttggctttcccttatctgcggttgataaaggaagggaaagtcggtacaaaagagttggatgaaaaggtaagcaatgtccttcgtctgattttccgcacctcaatggatccgaataaaccgttcggttctttaggctctcccgagcacggacaagccggacgaaagattggcgaggagggtattgttcttttgcagaataataataacgtgttgcctatcgatctgaacaaagcgaagaagattgctgttatcggtgagaatgcgattaagatgatgacagtgggcggtggtagttcttctttgaaagtgaaatatgaggtttctccgttggatggattgaaaaatcgagtgggatcgcaggcagaggttgtatatgcccgtgggtatgtcggtgatccgacaggagaatataatggagtgaagacaggacagaacttgaaagatgaccgttcggaagatgaactccttgctgaggctctgcaggtggctaaagatgctgattatgtaatctttttcggtggtctgaataagagtagccatcaggactgtgaagattcggaccgtgcttctttaggtttgccatacgcacaggatagagtgattagtgaacttgcaaaggtaaataaaaacctgattgtggttaatatttccggtaatgcggtagccatgccctgggtgaatgaagtgcctgctattgttcagggatggtttctaggttcggaagccggaacggctcttgcctccgtattagtaggagacgccaatccttcgggaaaacttcctttcaccttcccggcaaaactggaagatgtgggtgctcataaattaggagaatatccgggcaataaagaagaactggcacagtctaaacatagaggagatacgattaatgaaatctatcgtgaggatatctttgtaggttatcgctgggcggataaagaaaaaatcaaaccgttgttcccgttcggacacggattgagctacactactttcgcctatggaaagccttcggctgacaagaaaacaatgacagcagatgatactatctctttcacggtcaatgtgaagaatacaggaactcgtgaggggcaagaagttgttcagctttatatcagcgataagaaatcctctctccctcgtccgatcaaagagttgaaaggtttccagaaagtgaaactggctccgggagaagagaaagcggtaacgctgacgattgataagaaagcattgagcttctttgatgatgccaaacacgaatgggtggccgaaccgggcaagtttgaagcaattatcggtagttcatccagggatactaaaggtattgtaccatttgagttgaaataggtagatgtttggttagagattttttaaggagataacagagagtctgggtactcggaaaacgctaagtgattgcaacaaattgacttagcgttttttattgcctaattttccccgttaagatttttaaggaggatagggcagattatatcctttctttacaacaggcgcaagatgatgaaaccaaccggccttttggggatttcatggcggtgcaattgagaaaatcactgtctttggaaattcaaaaatataaagcttctcacaataaaggatttagctttatgttttaatcttgtaggacttcttttgataagactttcatccatttgtatatctttcaccgcttagtaccaacagactttccggtcccatattgaacaacaggtctattatactcaaattaggtagaaaacccagtttggactcaaaaacctgatagtaaggttgcggaacaaactctttatccacttccctgaaatcctttttcggatgaatcacttcccgaaaatcggattctccgggagcaaactccatcttatattcggaagtgcgctcaatggtggggtgaatatctatcaattcacagaccatccggcatagttcttcgttgaaatcgattaaaaactcgtatttcttttcgtagaaaggacggaagtcgtccttgtagtactcaaagaaaggagtattgttgtaggccgattcgatggcgttccaatgtagatgtctccagttgccgtggtcggagatgcggatatccttcattgggcacttcaatgtatcgggctttacggttgggatggaaagagctaactcacccgatgggtcggcaatggtgcaccggttgcggtaggtttgtttgatatagtggtcgtattgttctacaaataccttgtcataagccagtagtttggtataatattcaacgggagcgagataggctgaagataaataagcgatgttcatttctttcattttaattcgtttaggaggctctgttattaaggatattatgagatataatgaaggggttgtttcttttatgatccggaagattattttactgttctgaagaaacgcctccatcgatatccgtcaaacaaccctgtttctttttctttagagaaccaaatgatggaggcttttccgatgatatggtcttgcgggacaaatccgaagagccgtgagtcggagaagttgacggtattgttagaccccatccaatagtaatctttggtgaaataacagtgttgtgtgggttttccgttcacgtagagagtgtcgttctttatttctgcctgtttgccttcgtgcatcacgagggtattccgcagcaaggtcatgttccagggatagacccgaataaatttcccttttccggggacaatcagcggatttggttcggcatcttctttgtttgacaaaggttgaacgaagctctctttcccattcatggcctgttccagcagataatattcgtagcggctgaaactgcgcacatgggtgctgtcattacttcccatcaatccgtcgttggtgatggaaagggtatgcatgagtgacgtaatcagattttcttttgaagcggggtacgaataaagtcttttcttatccgggttaaactgtgcctccggagaaataacggagaaaagagaatcgaccaataacgtatcgcccggcactccgaggcaacggctgatatagatttcccggtggtcgatgataggttcccggattccggccggattattgaatactacgatatcttgtcgctgtacaggactttcgcaccaacgatgataggagaagagcgacatgaaaggaactcgtaacccgtaactccatttgttgactaagatgcgttcaccttggaaaatggagttttccataccggtggaaggtataaggtaggatgtaaaagcaaatccccggagcagaagcactacgactactgctccggcaaatgctagtgtccatttgaatttacgaatgttcatcaatatttatcaccttatcacgctattctatccgtacacttatcatcctacccacttgaagagtcggttccaacggatcttaccatcaaaccatccgcggtctttatcgagcgacagccatacgacgatcggtttgcctactacgtggtcttcgggcacgaatccccaataacgggaatcggcggaattatgacggttgtcacccatcatccaataatagtccatcttgaaggtatattgatcggtctttttaccgttgatgtagataccgtccggtttcacttcgagcttgttgccttcgtaggctacgatacaacgctcatagataggcagattgtcttctgtgagggtaatggtagctcctttggcaggaatccagatcggaccgtaattgttgcggttccatttggtataaagattgagcggatacatctgtccggcataatcttcgggttccattactattttgctgattagctttttgttgcccaaaagcgtttcatacatcttcttggttagcgggaaatgatataccggattcagtttgccctgtgcattccggctgtccagtcccatttccagcaatccgctttcccagccggagtcttctatcagcatggtgtcgtccttgctgatacccagttcacgaagcatatcttcgggaatgtacggaccggtggtctgtacgaaatagttgaattgcaggttttcggggttctcaatcgctttaccgtcaatcatcacttgtccgttgacaatctggagcgtatcaccgggaagacctacacaacgtttaacgtaattctctctgcggtctacaggacgccagaggacttccccgtaagtacgtggattatttaaaatctgtttccgtccggcagcgtagtacaggtcgtatacggcacgctgctgtgcacgagttaagctgtccatatcgatccgtttggaatagatacgttgtccttcaccgtaagccagcgtgtaaaaatctgtagtctgttggtagttgaccgctaccgtgtcacctgccggaaaattgaatacgacaatatcgttcaacttcactttgccgaatcccggtactcgtttatatttccactgtggccattctatgtatgatttagagttgaagacgggcagtgtatgttgtgccaacggcatagaaagcggtgtattcggcacacgaggaccgtagctcatcttgcttacgtacagaaaatcgcctaccagcaatgatttctccaacgaggaggagggaatctggtagttctggaagatgtagatattgacgaagtaaacggcgaccagtgcgaaaacaatggcgtctatccagctcatcacgctgcggacaaccggattcttcgactttttccagaaagaccaaggtactttctttgtgatataaatatcgaaaatgaaaggaacaacaatcaatccccaccaactccgtacccagataaggaaggcaagataaagaagaatagcaatggcgcatttaatccattgtgcgcgtgtggcttgtctcataatggtatatatttgaactaggttctgaaatcttaatcgttcaagaatggaaataaatcactcatgcccaagaatccttcgtgctgggctgtatattcggctgccaatacagctccgagtacaaaacctccacggctttttgcatcgtgtgtgagggtaatgctgtccacatccgattcgtaccggatggtgtgcagaccgaacacttctccttcacggatggaagcgatgggaagttcgttcggagcgcagtcgttggttccgctaatgctcccgtccggtgcggcgaatgttcctttcacccatttgtccttgcggtctatattctgtaagataccttccgccagagtgatggctgttccgctcggagcgtccagtttgtgaatatgatgcgtctcgctcatcgtcacgtcataattggggaactgattcatgatcttagccagatacttattgacagccgagaagatggtaactcccagactgaagttggacgaccagaaaagggtctttccaccttccgtacaaagctttttgatttcttcgccatgttcggtcatccatccggtgctgcctgataccagcttcacatcggctttgaaggctttcatataattactgtaagctaccatcggattggtaaactcaatggctacgtcagccgatttgaatgcttccgattcgaagtcttcctgattattgatgtcgatgatacagacaatttcatgtccgcgactacgggctaccttttctatctccttgcccatctttccgtaaccgatcaatgctattttcattgttttctgacttatattcaaaataatagttgcaaagataggatttttattacatttgcagtgcacattaacgtcttgttaacatggaacatcttctccactacgtgtggaaacataaattatttcctctgaaagtactgcaaaccactgaaggcttaccggtagaagtgattgattccggtctgcaaaatcccaatgccggtcctgacttttttaatgcgaaactaaaaattgacggtacgctatgggtgggaaatatagaaatacatatacactcttcggattggctccgtcacggtcacgataaggataaagcatacgattcggtcattcttcatgtggtcggtgaggcggatatggaggtaacccgcacggacggcgggcgaattccgcaattaatattgacttgtcctgaaaatgtgcagtctcactatcatgagctctgtgtagccgatcagtatccggcttgttatcctatcctcgcctctcttcccaaacttaccgtccattcttggctgacagctttgcaaacggaacgtttggaacaaaaagcccgcttgataacggagcgccttaagcattgcaatcataattgggaggatgccttcttcgtcactcttgcccgcaatttcggtttcggcttgaatggagacgcttttgaaacgtgggcaggaatgttgcctttccgtgcgatagataaacatcgcaatgatttgttccagatagaggctttcttttacggcttggcaggattgttggaagattcgtttcttaaaaaagggcaggaggatgagtatagtctacgtcttatcaaggagttccgttacttgcagcggaagtttgaattcacccaagtgatgaatgctactctttggcgttttctccgacttcgtcccgaaaactttcctactgttcgtctggctcagttggcctacctttatcaaagagggggtaagctgttctcgcggttgctggaagcagggacactggcggaggtgaggacacttcttgaggtcggcacttcttcttattgggaaagtcattatctgttcggccggacttcctcgcaaaagaagaaaacgatgggagaacggtcaaaagacctgattattatcaatactgtagttccttttctttatacctacggactgcataaggcagacgagggaatgtgcgaacgtgccggacgctttctggaagaattgaaagcggaagacaatcatattatccgttcgtggagtgcggcaggtcttccggtggtcagtgcggcggacagtcaggcgttgatacagttgcagaaagagtattgcgaccggagaaaatgcctgtattgccgttttggttatgaatatttgcggcacaaataatcaagatatcaaactagtcattatctttgcagtgtcaatcaaactcttaatttatatcgtgttatgagagctgaaaagtttgtatactgcttgctgatgatagtgttgtttgctggtattcccaccggtaaggcggtggcgcaatccggtgaggacttcaaaccgtttttggataagtttacttccagtgcagcattccagtacactcgcattaagttcccgttgaaaactccgattaccttattggcggatgatggtgaaacagagaagacattcccttttactaaggaaaaatggcctttattggatagcgagacgatgaaagaagaacgtatcgcgcaagaagaggggggaatttatgtttccaaattcacattgaacgagcctgatcgcaaagtgtttgaagccggttatgaggaatcggaagtcgacttgcgtgtcgaattccagctcttgcctgatggaaaatggtatgtagtagattgttatacaggatggtacggctacgacctgcctattgctgaattgaaacagacgatacaacaggtaaaggaagagaatgcagctttcaaggaaatacatccctagcgaatagccggtaggaactttgtttatggcgtccctacataataccccagttcggactcttttccgtccaccatctctttgacaataccgtttttggcattgaactcttggaagagttcctcatagtcacgtgtatagtcggcgtccggtactacattgacatcaaaggtcaattccgctttcccgttgggaagcatattcccgaaaatccggatgcggtgaacaacctcgcctatatttttaatactgttgtaggttgccttgaattgcctgataccctcttccggaatgatgatatgtgaacttttatccagaatgatacagccacaagaaggctggatatccgaaatgaccagaggagcgtcaccggtgttggtgattgtgaacatgatatctagttgttgcccttgtttgataggataatagtgccttaccgagtcttttatgaccatagttgtaggacgtactttcttcttacaccctgagaggaagaagggaaatattgttaataagaggatataaagtaccgatttgttcatagtggatgttttatgttaggggttaccttatttttactttttatggaacgaatgcgatttcatctataccgatctgggctcttggctttttagctcccatgacctttatacttaccagttctgccctgttcaaatctataggagtggttatttttactaattcgcccttttcaacggaatcatccgtctccagattgattgtcttatagattgctccgtccttcgatatttcgatttgccggggagggtagaaacgatgtctgggaagattcaagaaactgatataaatgtttcctgtcttattgataccttttacaggcagactgatttcatattgttctttcggaagagttgtccagccgcaatgataattgtcgggtaaaccgtgcgtgctgtctgtgagtctcttcaacccatctttgtccgttgggggagttgaagaaggcatgattccgagaaataagttctttttaatgtcggaagcaagtatatactgttcccattcttttatatagtagtcgatttcatcggccgattcattatagtactccatccccgtgaaagcatgatgttctttgagttgggtaagccatttccgcacttgcggagtcggttggatttgttttccgtttcgttgggcatatccgtaaggatcataactgtggttgcgtcccatctccagacgtgtataagacaaggctgtctggagttcatggagctttttacgctctttccctttcgcatcggaaacataatcgcccatttcatcatagaatttgataaacttctccggattgaggaatgactgctccaattctgcaataccgacatagatacctaacttcttaccggactggacgctgttttccaagttaatgtaatagtcgtacagccatttctttgatagggggtactcttgattgaaatagtctctgaccagttcctcaacgggaagttccgggttgatgagaagtgccgacagtacaaaagtcctcattgcatcgaaagaagaatagctgtatccgcttccgttgaagaaaatgccactggctctgttctgcttgaagaaccggagtctctgctgggctatcttcaatatggggaaaggtgtcagatagtcatcgaagttgttgatgtaatcccatatataaatgttcttcgaaactttcttccattgattcagctgttgcataaactttttttcctgtgcattcttgccgtctatccgtcggagtggaaagtctatggcactgacaatgatacctgcattggacggcaactgtttgtccgtaacctgcttggtgctcagataggatatggtaaaaaaggaatgtttaggaaaacgttgcgacagccggagtaacagttctgtgacggcaggtgttgcgttcttctccgtatttcccatcgctgtgcaactggcgcaagtacaggcgtacggagtatcatccggagcaatgacaaaacgagaacttcccttttcaccgatattatctacgatatagctctcaatttgccgatacatctcttcggaagagaaacaaagttgtgagtcgtctgtcttaccgtggatggtagcatataccttatctacattgtctcccaatacttttctcaggttgtgtccccatataccccaactgtcgtcaaagttattgagtcccattactcccgtataatcgggattcagaccggaaggggaatagatactttgataatcaaaagcaaacgtaccgcaagtatctgtcagattgatgatggcgggaggaaggtcggaaccgttgatacgcgggtcttccttgcttatcttttttatcaattggtattgcagccacaacatttgtctggcatcggcagctgtgagttctatttccgatcctttgatggcgatcctgaacccttcctgcaaggtcggatctatgcatatgataacacgccacatttccttctctgataccccgaaagcgaccatttcatcgtcatttgcacgctttttgaggtgctcgtacaggtatttggcccatcgggtatctttgtccgtcgggtcttcgccgattgtgatgaggtagccttccttggaggcaaatatctcggtgcgcgcctgcatatggcagccggataaaaggcagcaaacgcatatcattcctgccagtagggggcatagcttatcagaatgaaatatagatctgtgcatagatattatataggtttttatagcgtgtcgataccgtttctattcgatggatcggatcctttccccgcactgtattcgtctggttatagtaggtattccaagtccccatcaggccgatggtaatgttgggactgaccatatattggcctcccaaacctaccattgtgttggtatgtgagaaagaaccgggcaacgcatagtctaatacggccgtttccggtgccgaaccgatacttgccatggcattgatatttgtctttccatcgctggcagggaaatatttcgcaccgacctgcgcattgtaatagaatttggagttaaagaagtgaaggtcgagtttggcattaagccggacctcttcgatggtcttggctacctctccgccaacggtgagcaggtttgttttcgactcatcccatccggtgaatatgtatccgttttctccgttactgccaataaagaattcgttattccactcataatgcttgttgtaggcagctacccgtctgtagccgacatgtcccgctatttcccaatcattcttgagataatggcgcaatgctacatcggcagtaatgtccgggaagtatttggtggcaaaagcggcattgatcgtagtgctccatttcggtgagaagtgatgcgcccattcgccttgtacctgaatgccgactccgcccggcgtctgttcctccgcctccatactatcgcttgccgatccgcttcttccggcatagttgatacgtccggtataagtgtttttccggtttttacgggtatattcggctgtggcgacagaggtgataatatcctcttcaccatagcgggcacgcagataagtcagggctatctcatttttaagcgtcatgcttcgtaagcccgataaatgccgttggaaagagcgatattccatgattgaaggctcgtagaacttctgataatagtatgcggaatcagcttgtctgttagcctcatacaccactccctttgtgtacttcaaagatttgttctgactgtcgaaaagtaacgctgtgtcaagtaccgcaagggcttgctcaggttctttcgcttttgtcagttgcaaagcgcggtattcactgctttgcgagaaagcgcctataatctccttattactcggatatttattgagtatcggcttcaagaattccagcgaagcttcgtattttttgtcacggtccaatacggtagcccttttggcttgatagaatggctcttccggatagaaattgataccttgtgccgtatatttctcgaattcatcgtattttcccaataatccagacgagttgatggcatagcgtagtcctaaatcactcgatggattcaggctgacgagtttgacggcttcatcgtatgctttctgcgtagcccccgcttccatacatttcttgatgtaaggaattgccagttcctcgtatcctatcacgtagaaaatgcgcatatcctcatcactctgttcgatggcagacagataaagttgcaaagcttcttctgttttatccattttatcgaggataaatgcccttttcaacgtgccgttttcgtaatcggggaaatgaagtgtgatggtatccaatgtggcgagcgcttcgttgtaacgcttcatattgatatagcaactcagtgctttttcccatgcggcaccgtttacttcgttgtctatatgcctttgtgaaacgaataatacatgaggcaatgcctccgaatacaggccgagttccataagtctttcggcttttttcatgtgaagggaagacatagccaaagtaatatcgtaatcgtcgggatacatatcatacagcttctttaaagccgagtaagcgagatcgtcctcattcatttgacgataaagcatatattccttatacaagattcccttgtctgtgttaccgtattgtttcttcgcctctctgatatagaagagcgcgtcatcggtgtatcctcttgtcacggaggtattcagcagataatccaatgcttccttatccttgtttccgctttcataagccattccgtagagtacataaggatcccgttgcttttcggagcgggcggcttccagcaacagattgttatacatacgccgtattgccggactgttatttcttctcatctgttcctgtacaaataccaatgcttccggaaaacgtgccaattcaccgagaattccggctcttttgatgataagtgcggaacttccgggaatagccgccaatccattggacgaccagcctaaagcggcttcccggttaccctcctgcaagtgcagattgataatgtccagataaaactcttcattatcgggagatatcttgatgagctcggtcagtctttcgattgcttccttccggttaccgccttttttcatctggcgatatcccatttccagactatatacataatccttccgtaaaatggtatcgttcggataaatctgattgatacgtctcagcaaacggtcggcttccacatcgttgttctgtttgcggtacaactcaatctttctgcgccacaatccgcgccaatacggatttacttccagcaactcatttacatagcaaatcgcactggagtaattttctgtgatgtcttcgacatccaccagcaaatgtttggcattgacattattataattatcctccacggctttgacaagatgataacgagactgatcgtagtctttctcatggaaccagtatttacccatgagccattgaagatcggagactttcgggtatttctgaagtccttcatccaacagtgctttccccgcttcccactcttcattggcaaaatgctcctgtatgatctgggcatattgctccggcgtctggaaacctttgtcgcttccgatggaagaggttatcagcaggagcaaacaagctaatatggtgatcttatggagaaatactctgttcatcttatcttgttatttatacattcttatattgttgcgggttcaggattgactttggtatcttcctcattggcatttcctgtcttctgtttgaatcctgtccgttccatcttcttccacttgaagtctctcttggtcaaataactgaggtatccccttagggaacagaatgtaatgatgggatgatagaaaatcggttccaatatggaggcaatgataatccataaatattcgtatcctcttttataaagcattccgacgtagtaatcgtaagtgataaccacgatggacaggaattggcagaatacgtaaatggtcaggtaaatcatccatgccgtattccagttgacagcccctgtgaaagccaggtaaatgaaaacgctgaatcctgtaacctcaatgatgggtgccaagaattcaaagataaacatataaggtagggttaacagccccatctgtttataggttttcttgaaaatcatcttgtgatggacgctcaatgtttggaataatccccgtgcccaacgggtacgttggcggtaaagcattgccaggttgggaggtccttccgtccaacagcaggtgtccggtatctgcactatcttgtaaggccgggagaagtcgcacatatatcctaccatgcgggtaatcatgtccatgtcttccgcaaaggaagtgccgtcataacctccggccgcaatagctacggaacggtcaaaaagcccgaatccaccggatacattcggcatcccgttgatggccgaccatcccatcttacctatcagataggaacgcatatattccaaattctggaaaagcggaataggggtacgcggagtcttgacatcaacaatctgcccgtccttcactacgcaaccgttagccatcagcatagttccgctcacggcaatcacttgtttgtcagaagatatgatcggtgaaatacaacgatacaatgcatacttctccagaatacagtccacatctgtacagataaaataaggataggaagaggcgttgatacctgcgttggaagcgtccgctttcgttcctccgttctctttatcgacaacgatgaggcggctgtatttcggatttgtagacttcagaagccttttgaacggtttggtcttgattcgttcgatgtatgcgtatggtacttctatcagttcataatattcggtaattttctccaaagtcttgtccgtgctaccgtcattcacgataataacttcgaaaactggatattcgagggcaagcatcgagttaacattatcgataatagtcttttcttcgttgtaggcaggggcaatgaccgaaacacccggtgtatagggagattctttgataattttccgtacataactttccacatagtagtcttttctccgtttcaaagaaatgaaagagaggaaagcgaatacgataaaagatatcgccagcatactcgtataaaagaatacgaaataattgaagaaggtaaatagtatatctttcatattctttttatattaactggttaataagcgggtgttttgtatgagcgaataagatcgctgtatgagaatcggcttttctctccaattgttcgaatgttttcctgcccatagcactgtaatcgtaaagggctttcagaatcactcgctttgttccccaattgtcagcgtcatcgtaagcattgtacaggaatcctaaagccttatcagttttcaagtctgcaatagctgtgataatctgccgtttgacttcttcgggctgcacattgtacatctcaattagcttcggttctacctctttgtacttaagtttacctaacgtctttattgcctcatttcgtatttctacagaacgggcattgatttgcttggcgagagtcggagcactttctgtttcattataaagtctgatttcattaatgaagaatatcttcacattttcttcagccgaagtatttacccatttaatgaaactaggcgtattgtagcctactttccggcggtgttcgaggatagcatgtaattccatcatatcccattgccttagcttcatgctgatatcttcatcgaagaaacggaacgggtttccttgacttagccacatatatgtatagcgtgccgaattccttagctctattttgcggtgataaaggaaacgcaccaatactgcttcagaggcatatccattgatggattgaatgattttcagggcttgtatcttggctctcttagctccgaattgaagttcatgttcgaggaaacgggttatttggaatacagtttgtattgaatggtagttcacttcattgatttcattctcatgtgcagtctttatctcggtcagcagttgagtaatgatacgaagctcgttgggtttaggacgctttttggtatcatacttcagtctgtcagctatctcttcgtcacttattgtgctggaatctaaagagatagatagcatatcttcatagtatttgtcataagccttttggtatctacgtttttctttctttctgttgaatataccatatatgatatgtaataaaagaaataggtacgcaatgatgcagaacattacagcaatcgaacatattcttattattaaaggatagccaataaacttgtaatatatccaatagaaataatattctatgtaatctatgccatataatacttgctccatttcttttgatatatttagccaaaaaaacttgtatattcaaagcgatattcttatatttgttgtatggaatgtcttgtcttatgcaaatataagaaataacttgtatatattatccatcgccgatgaacaaagcttttgcggtaagtttatggctacttgttattttcgatggaaagggtaaaaattaaagataaacaaggctgttatatgatttaatgttaagtatttttgtgattggttaacaaaagaggctcgcttatggatggcataaagcgtggtttcaattgagaaaaggaagatgaacagttattaaatttgagaattatgatgaaaattagaagtttgatgtatgtccttatgggaacatttaccattgttgcctgtacaaacagtgacaatgaagcaacaacgggagatagttctacggacaagatctctacgggatttgactgggcgacaagccgtacagtctcggtatctataacatcggctaacaagacacttatttctttatattctgatgcggaatgtaaaattcctttgttggagaatgctcttgtagaaggtgaaacaactgtggatttgaatattccgatgcattctcagactgtatatgctaaatatgctgctatgtcaggtccccaagtacggacaattaatttgaaagcggttactcgggcagatggttctattaatttggaggatgcagtagcgccaacaagtgaagaggatgcaggttttcgtttttatcataacacaggagttgctatgtttgaagacaactggccgaagcaatctaatggtcctgacaacgatttgaatgatgttgtcatcgagtatgacctaaaggttaccgaatgccaagtagaaaacttgttacctgcacatggctataaagaagggcttttgcttactttggatcttcgtgccaaaggaggatattatccgacaaagttgggtgtggagttgattggacttgataagaagtatattaatgagattacttctcgtattctttggaaaggcggacaaggtacggaagaagaaatggccagagaagaaactgggggtgattttgtagaggtaaatatgaatacttataaactgactgtcgatgcaaagacaggtaatccggtgattatgttggatggattgtccgcacttggtgataaacagaatttctttcaaacaacagaaggttatattgtcataggaaaaccgatgttacgtgctgaaattaagtttgccggtaagaatcgttctgaaatcactgataatgaagggaaaaatcaactggaagtttatagaaatttgattttggatacaaagaaacaaaatttctttattgtgacgaatgataataaagagattcacatgaaaggatatgagccaacccgtttctatacaaattatgatgttgatgcagcaaaagctgatgttgaaatgataaatggtattccatattgtaataagaacggcttcgtttggggggtaaaagtacctgtgggtgtgaagcatacatacgaaagagtgccttttgccgaagcttatcctcagtttactgaatgggcacaaagtaatggagctcagaataaagattggtatttggcaccattatatggaaaagtagtagaagcttggtaatacaaatgcatacccaatacgttatttgaggtattttgtacaatttgaacccctcttttttcgaaaagaggggtttctttgtatccgaaagaatgatctttaaactaataccataaataatgaagcgattttttattagctacagtctgattacttttcttcttttggatagtgtggtgctttttgcgcaacatactagctcttttgtaaaacagtggaaaatagaagatgaatcccatgctttacagataatagaacatgccgatacattggaactgattgtaccgggtgggttgactctatggtcctcacagcgtctgacgggtgattatgaaatcagttaccatatctgtatggtgatgaaagggggaaggcacgatcgtctgagtgatttgaattgcttttgggctgccaatgatcctaaacatcccgacgatctttttgctcgcagccagtggcgcaacggtgtctttaagaactataatacattgaaccttttttacgttggatacgggggaaatgataattctaccacccgttttcgacgttacagaggagaatattatggtattgcagatgataaagtcaaaccgttattgaaggagtatactgatacgccgcatttgcttgtacccaataaatggtatgaaatccggattcgggtagaaaaaggaatgactacttacgcggtgaatggtgaagaattattccgctatatcctcaccggaaacgaaggagacggacatttcggcctgcgccttttgcaaaaccacgtgttgtttaccggctttaaagtgacttctttttgagactgtttataccgcatatagaaacctaaataagatataaatacccatgatgaaacaactctttaccagattacgggtgattaccctattctcatttttgtattcagcatttcttcatgcgcaagtcgtgaccgacgagcggatgttctcttttgaggaatcgaagattccggattacataacaggtgtcaattcgcaactctctatttccgatacacattataaagacggaaaacattcgctgaaatgggtctttgagcctggaggggtattggaattgaagaaggatttaaagtttgaaaagaaagatccgacgggtaaagatttatatctttctgcttttataatatgggtgtacaatgaggagcctcaggacgcaacaattgagtttgagtttttgaaagatggcaagcaatgtacttcgtttcctttcggaatcaatttcagaggttggcgtgcagcatgggtttgctatgaacgggatatgcagggtactccggaagaagggatgaatgagcttcgtattgttgctccgaatgaaaaaggaagccttttcatcgatcatttgatcactgcgacgaaggtggatgcccgtcagcaaacagccgacttacaagttccttttgtcaatgccggaactaataatcattggttggttgtctataaacattcattgttgcagccggatatcgaactgactccggtgagcgaggcgcaaaagaaagagatgaagttgctggagaagcgtttccgtgacatgaactatacaaaaggtaaagtatcggataaagagatacagaccatccgcaagaaatatgatttctatcagattacctataagaatggcaaggtttcgggggtacctatttttatggtacgtgcttcggaagcttatgaacgcattataccgaattgggacaaagatatgctgaccaagatgggggtggagatgcgtgcttatttcgacttgatgaagagaattgctgttgcctataataatagtacggcgaatccggaagttcagaatgaaatgaaggagaaattcctggcaatgtatgaccatattaccgatcagggagtgacgtacggtagttgttggggaaatattcatcattacgggtatagtgtccgtggtctgtatctggcttattttctgatgaaggatgtgttgcgtgaggctggtaaattgcaggaagccgaacgtaccttgcgttggtatgccatcactaatgaagtatatccgaagccggaaagtaacggtattgatatggattcattcaatacacagactaccggccgtatagcaagcattctgatgatggaagatactcctgaaaagttacaatacttgcggtcattttcccgttggatagattacgggtgtcgtccggctccgggattggccggttcgtttaaggtggatggcgctgcttttcatcatcgcaacctttatccggcttatgccgtcggtggtttggatggggcgactaatatgatttatcttctcaaccggacagagtttgctgtctctgagctggcgcatgaaacagtgaggaatgtgctacttgccatgcgtttttattgcaataagctgaacttcccattggctttgtccgggcgtcatcccgatggaaaggggaaattggtgccgatgcattatgcaatgatggctatggcgggaactcccgatggaaaggcggaatttgacgaagaaatggcagccgcttatttgcgcttggtgtccggtgcttcttccgatggccaagaaccggagtatatgccgaaggtatccaatgcacaagagaaaaagattgcaaagcggctcgtagagaaaggtttccggcccgaacctgatccgcagggaaatctggcgttggggtatggttgtgcctctgtgcaacgtcgcagtaactggtcggcagtggctcgcggacattcccgctatctttgggcggccgagcattatttgggacgtaatctctatggccgttactttgcacatggaagtttgcagattcttaccgcagctccgggacagattgtgactcctgctactagcggatggcaacaggaaggtttcgactggaaccgtattccgggtgtgacttccattcatcttcccctcgaacagttgaaagcgaaagttatgaatgtggacaggttctccggtatggaagagatgctctattccgatgaggcttttgccggcggactgtcacaacagaaagagaatgggaacttcggtatgaagttgcatgaacatgataagtataacggaactcaccgggcacgtaaatccttccatttcatcggtgaaacaatcgtttgtctaggatcggatattgaaaacgccaatgcggaatatcctactgaaaccactatattccaattggcggtaaccgacaaagcaggacatgattattggaaaggttatcaaggtgaaggtgaattatggatggatcatctcggaaccggatattatgtacccgttacggctcgttttgagaagaagttcccgcaacattcctgtatgcaggataccggtaaggagacgaaaggggattgggtatcattggttgtcgatcatggaaaagcccctaaaggtggaagttatgagtatgctgttcttccgcagacaagtacggctaccttacaagcgttcgccaagaagcctgcatataaagttctccaacaagaccgtaatgcccacatcgtacagtctttatcggacaatatctattcttatgtactgtttgaaactccacaagcgttgcttcccggcggattattgcaacggacggatacttcgtgcctggttatgattcgcaaagaatctccggaaaaaatgttgttgaccgtatcgcaaccggatttggcattgtatcgcggtgcaagcgacgaggcttttgataaagacggaaagcgggtagagcgcagtatctattcccgcccgtggattgataacgagagtggtgagattccggtaactgtaacgttgaaaggacagtggaatataaaggaaactccgttctgtaaagtactctccgttgacaagaaacaaacagtactccgcttcacttgcaaagatggtgcaagtcttgaagtcatgctggagaagcggtagttccctacattgaaaactttggtttcctgccttgcaactttagtttcaagcgcatgaaactgaagtttcttaccgatgaaaccaaagtttccgcgtatggaaactaaagtttctaacgactgaaactgtatagttccttccgcataagattgactgtaataagctggcaacgtgtgacagcagttccttctgtcacattgccatcacacactgctgtcacagtcttacaggtttattatcaatgatttatccccttttatgtgacggatgacagcagatggatgagtttaactttatgagagaggttagaacatgaacatggcaaccgctacgatacggttattgcatacagcatgcgcatttttaattttcccgttcattgggttgagagaaccataccatgctgtgcttaacgtatactccagtccgaatttccagtgaggaacattataagtcagttctgcacccgccgttaccaattggtcgagatttgtacctgttccgtaaagttgtgcttttccattcggagcatataattcgtcgcttgttcccaagttcttggcgtatccgacgaaaattcccggtttccacttctttccatagacaaggttgaaccacgagctggaaacacgaattggagtgtacttctgttctcctgtacgttcatcgatagattcgataccgaatccaccgagtccggaagcctgtgtaaggttggagcccaaaacgcttttggctccgataaaccaatctttattggtatatttcatgtgagcctcataggataaagtagtgattcgttcgtctactttgaatctcttcccatttccaccgatagcttcctttcgtggtttcattgatagcatttcgattcccgcaccaatcaggaatcctccgtttttataatcggctcctacgtaaatttccggaatacagccgtttttcaagtattcgtggctctttttactcttagtggggttatctaaatcgataccttgcgaggtatattgggattgccatacggcagctcctgtcagttggaagttcttattagtatagcggtaacgaatttgtggtgcacggctgaatggctggaaaggtgctccgacagaaagattcagaatctgcggagcaacatctccaaatagtggatgccaagtttgaccgagcaataaggccgatttcccccaatccagattgagataagcatggcgcaggcggactaccgaataagaagtaccggtaccccgaaagtcggcttctattttggcggaagtcttggctgtccccagtttaggaccggccacgtctactcccagacgtgaatataaagtatagaagttgctgcttggcgttccattcaagtcatttccgtcttcgtcacgtactttatctttcggatacatataaaataatccgtctacggtttcttcattggcgcgactgttgtagtagaggtcggtgcgaatctgtccgtaaaatttaaacttgaagtcctttatttgagcaaaactgcccgataccatcatcaggcaaagaaagattagaatgtattttttcatcatgtgtttgtttatagacgggcgcaaaattacaaaaaataaccgtcaattaacttatcgttgaccaaaaaagctaagaacggcttggttgtacttctggaatgtgccgcttttatggattgcttttagcaatttccggtctgctccaggtgccaggtattcccagaaggttttcattttattgagcagttgcccttcccctccttccaattgtgcggcatattggctgtatacggaggtgtgcatggagtgtagcttgtttctcatttcatcggcggatagtgtacggttctctttgtattccagtgccaatgccggattggctagtaatccccgtccgatcattactcccgccagcatgggaaactgctcttggatgcgcaggatatcttcccgtctttttatatcaccgttataaataagcggatgtttgcaaacgctttgaaaagcggcaaagccttcgaggtctacgtctcctttatattgctgtttgcccaagcggggatgcatcgttacctgtcttagaggaaggtcgtttaataggggagcgatggcgagacactcctccggattttcccagcctaatctcatttttacggaaaagcggatttgcgggtactttacgactatacctaataatgtcttgacctcttccggataaggaagtattcctgagccgttatgccgtttggctaaaatagggaaaggacatcccagattgatgtctgcttcgccatatcctttttcaatgaaaagggaaagaatggtctccgctttttctgcggacggagcaatcagctgaggaactaaatgcggcacatgattgtttgcgaaatcaatctctctgatatctttattcctgaaactttccttctcaattcgtacaaacggggtataataagtgtctataccaccgaaaacggcagcatgcgcattgcggtaaaatgcttctgtatagccttgtagtggggcgaaatgaatgggtagctgttgcataatgctctttttgcacaaagatatatcgaatatctttgatatgtatgtttttgtaccataattgaataattttggttggtaaaattgtggatgtatctttaaatttgcgcattgactaatctaattttaaatgtaaaacgaatagtatgcaaaccgaattccaatttaagttatcatggaagagaggtctcagtgtgttactgttaaccttattttcattctctcttgctgtggcccaagtactagtacggggtactgtcatcgatcaaacaggagaatcggttcctggtgcaagcatccaagtaaaaggaggcacacaaggtacgacttccgatctcgacggtaaattctcacttaatgttcccaacaagaagtctgttcttgttatctcttttatcggatacacgacgcaggagttgccggttgatgtatcgaaacctatgtctgttgtattgaaagaagatacaaaaacgttggacgaagttgttgtcgttggttatcaggaggtcaagaagaaagacctgaccggtgctgtggcaaaggtaaatatggaagatttgcttaaaaccccttcctcttcattcgatcagacattgggaggacgtatcgccggagtaaatgtgagttcaggcgaaggtatgccgggtggaacgatgaatatcgttatccgtggtaataactccttgactcaagacaactctccgttgtatgtcattgatggtttccctgtagaagatccggctatcgcagctactattaacccctccgatgtagaatcagtagatgtgctgaaggatgcttcggctacggctatttatggagcacgtggtgctaacggtgttgtaatcatgactacaaagaaaggtaagattggaaagccgcagcttaagtacgatggaagtttcggtgtgcaaaaagttaccaatacgattcctatgatggatgcctacgagtttgtaaagttgcagaacgaaatgtttccggcagatactaagaaaaactatctgaaagaatatgaaggtaagcaatggacattggaagattatcgcaatgttgcacaatatgactggcaggatgaaattttccgtaccgcttggcagcagagtcataacgtcagtttgatgggaggaacggaaggcgtccgttataatgcttccgcttcttattttgaccaggacggtatcgtgctgaactcaaactacaaacgcttccagacacgtatgaatacggtagtccgtcgcggtaaactgaatatgagcataacagccaactattcacgtgctatccagacaggtagttctacctctttatattcatccagtggtatgaataacttattttatagtgtatggggatatcgtcctgtgactgaaccggatgttccattgagcacattgatggataacgcactcgattcatcggtagagccgacgaatgactatcgtttcaatccgattatgtcattaaagaatgaataccgtaagaattatacgaacaatcttcagttgaacggatttgtggaatatgaattcattaaaggtctgaagttgaaagtgtcgggaggctatacatacgacgcccgtaacaatgataccttcaataactcgaagacacgttatggtagccctatttcaacagataaggtaaatgctcaggtggttcgcaatcaacggctgacttggttgaacgagaatgtcttgacttatcagactaatataaagaagaaacacttttttaattctttgctgggtgttaccttgcagaattcggattatgaatactactctttcaaaacaaccaacatcccgaatgaatcgatgggaatggcaggtatgagtgaaggtattcccgctactacaagctcggagaagtcttcatggtctatgatgtcttatttggggcgtgtgaattataattataaatcgaagtactatgcgacagcgtctttccgtgtcgatggttcttccaagtttgctaaaaagaaccgttacggtttcttcccttcaggctctttggcatggaactttactgaagaagatttcatgagcaaatataaatccgtcatctctagcggtaagttgcgtgcaagctgggggttgacaggtaacaaccgtgtaggcgagtatgaaacgtatgctttattgaaaatgttgaaggcaacttcaaataatgttcagacaggtgtatatccgtttgagaataacttgaacagtatcggtatggtgcctatctccttgttaaataaggatctgaaatgggaaacaacagaacaatggaatgtcggtttggatctgggcttctttaacgaacgcatcgggatcaatgttgactggtatatgaagactacccgtgacctgctgttggatgccgatttgtcttacacgacaggcttcaagagtgcaatgaaaaatgtgggtaaagtacgtaactcgggtgtggaatttactttgaatacagtaaacatccagaaaaacggttttaaatggagtactaacttcaatattgcattcaataagaatgaggtgctggagctggctgaaaaccagacatcattgctgactgccgcttatttcgaccaggcctacaatacgcaacctacttatattgccaagaagggttattcaatgggtatgatgtacggttatcagtatgaaggtacttataaatacgaggatttctacaaatcaggtgatacgtatgtgttgcgtccgggtgttccttacttctctagcgaaagtaatacacagccgggtatgccgaaatataaagatctgaatggtgatggtgtgatagataccaacgaccgtacgatgatcggacgtggcttacctattcatacgggtggtttcacgaatgatttcgagtacaaaggattcgacttgagtattttcttccaatggtcttatggaaacgatattttaaatgccaaccgtttgttctttgaaaacgtgaacaactcacgtaatttgaaccaatatgcaagttatgccaaccgttggactccggaaaatccgtatagtgatattccggttgccaagaactcaagttctaataaagtggtttcttcgcgtgtgattgaagacggttctttcctacgtctgaaaactctgacattaggttatactctgccgaagaaagtaattaagaagtggggaatcggcaatgcccgtgtatatgtggcagggcagaatctttggacaatctccggctattccggttatgatcctgaagtgtctatccgtaacggtgctttaacgccgggacttgactactctgcttatccgagagcttatgcaatcaacttcggagtcaatttaggattttaatattatttgatcagataatagatataaagaagaatttatgaaaacgataaaaataacattcctttctttggtagccgcatgtacgatggcctcatgtgactttttggaaaaggagccttataagattactccggaaaattacttccaaaatgaaacggaagtttccaatttcctgaccggtatttatgcaaatctatcgcagacctctttttatggtaatgattacatggttcttgcaggcggtgacgacttggaattttatggcgggtctaccggacgtatttctaatacaggtttgatctgtaacaatacgacaaccagtgacgctgctgttacacagttctgggcggatttgtatagtggtatcgaacgtgcgaatatgctacttgaacatattgacaatgtaccgagtatgagtgcggaaaaaacagcccaatataaatcggaggctcgtttcctgcgtgcattctattactttaatctggttcaatgttggggagatgttcctttgaaattggaatctacttattcatccggtactgtaactgacaaagatattgcccgtaccgacaaaaatgtgatttataagtttatagtgaaagagatggaagaggcagccgatgaaggtttactttcagccaaagatctgggatataagcctaatcgtatttcaaagtctgccgcatggggaattttggcgcgtgtctatttgttctgggcaggtgagcataatcgtgatgaccaaccggaacctgcggaagcgaaatcttactttgaacgtgccagtcatttcggacagttggtaatgggtgagggacatgaacttgcagaagattattgggatgcatttattgatatgtgttcagataagtacaatacatctggttctaatgaaagcatttgggaggtagaatttgcaggtgacggtacaggtgatgttcgttctgaaggacgtattggtaatacaatcgggcttcaatgtgcagacttttcttctcaatctagtttggttggaaaggctgatccgggatactcttacggattcttgtgggctacaccgaagctttatgatttgtatacaagaaataatgataaagaacgtttcacttggaacatagcaccttttacgtatcgtgcgcttgattcggatgcagataaggatattaaaggtaaaaccggtattgtagggagaacttttgagaaccaggaattgtatgaattagtaacaggatctggatggtatggcgagaaatcttatgattatgatggagcggacgaaggtaaggaattcgttaataaaggaagtcaaagaggagatgtttataagaaagctgttgcaccagaagaagtaagaaaggatttatgttgtgcgaagttccgtcgtgaatatgagcctgctgccaaaagaaataagaatctcacttctattaactttcctattcttcgttattcagatgtgttgctgatggttgccgaagcggaaaatgaatattggggatatccgacagatttggcaaaagaatgtcttcgagatgtacgtatacgtgcaggaatatcagataatacaaatgatcttaattcgcagaacgctttccgtaatgctataaaagatgaacgtgctatggaattatgttttgaatttactcgtcgctttgacttaattcgttggggagaatttgtggataagatgaatgaacaagtagatttggcgttaagtggaataaattggaatcaaggttctcaggttgcaccatttttccgtgtgacttctgcttatcagtattttccgattccggatgcggaaaaagctgtgaacaaacttattacaggtaataatcccggttggtaatcaccttgagtttatttaattatttaagaaaagaatgtaacgatgaaaacatataaattgttattattaagcttgggcgttttttgcttcactgcgtgtgaaaaagaactggaccgagatttaacggatgccaatgtgagcgtggcaactgatgagaatgtaaggtatgagggaaatatcttgactgtaaagaaaggaactccgatcacattccttcttcatggtgatccggattatgtgtctttctttagtggtgagcttggtcatcaatatgtctatcgagatcggaaagaatattcggctgaagatgttgaatcgtgtgagttgaagtttggaatttggacagcaacaggaaatgcaaattcatgtactaaccaattggatgtcttttatatggctgaagaacaagcccctaatttagaaactactacattttttccgggaatgagtaagactgattttgaagcggactcgattttagtagaaaaaacgacagaatggaaagctttgatatcacgggaagagttgcctaacaaagtgttaggtagtgctgccagtgcgctaaattatagtagatcagtaaaagaatttataggtaaaaagtttacactggctattgtgctgaataaagatgggaaaaaggcatcagattatccaacttatagtgatggaactcctatccctcagtctacattcaactttactggtatgcgtgttgaaacaacttggagaaacggacgtgtgacaactgcttatgcatcttctttcggctttactcctttgaatatgaagaataaaacagtgtttaaggatcaggatgagattaatatgcccaaagaccgtgagtatggttctgtatcaacaggagtttcgggtatgtggaatttgagcagtatagcaaatggcggattcaccgttacaggagcggcttctggttttgattggaaatatacttggttggtttctgattatttgaatttccttgaatgtccggaaccagatttacccgtgaaggtaaaagatgtttctttggatgtggatacttatagttatacatacgatcaggtgggtacttataccgctacattcctgatgaataattttagttatgcacatgaggattctaaggtttgtgagttgataatcaatgtaacagaataactttaaatactatacagattatgaagtacataaaattgtatatacttttcttcttgatgatctttgccgttacaggttgtacaacggatgatttgaaagatgatgtgaacgacctgaaagatagggtgacgcttattgaggaacaggtgaaattgttgaatgataatttggcggtgatagcttatattcttgacacgcagaataagacaatcagtgaggtgaagaatgtaaccgataatggagaggttacacagaagaaaattgttctgagcgatggtacggaattgacgttgactataggtaaacctggaactataaatgagcctgaagttacagtaggagaagataaaatgtggtatatcaatggagaacctaccggtgtgatagccataggtgagccgggaaaaaatggtgaaggttatcctgagttccgtgtgcaggatggtgattggcaggtacgctttggtgacggtgagtggaagcctgtaactggcggtgaaaatgtggctgacggttctttgggcgatcagttttttgtgaaagccgaagtggtagatgataattttgtggtaacaatgacagatggcacggtacatacacttcctattgttgccgatttagcttgcgctattgataagacaagcataggtttagacgaagagggtttttgggtaatcgagaaagatacaagagtagaagtgcttgtgaagataacaggtgaaaatccgcaagttacttatccgcagagttggagggcgacattgagtgaactggaaactgcggatgataaaggtaacaattataaattgtatatctatgctcctgctgctacaatcaagactatgaatactcgtgctgctgcgaataacacttccgatataactgttcaggtgcagaaaggttcattgtgggcggtagataagataaaagtgaaaacaccgaaagaactgaacacaaatgaaggaaaatataatgatggtcaagcgatccgtgtaggtggattggaaataacaagagaattatatggtgatattaaggctgttcctgcagatggtaaattgactgaaggtggtgtctatttcatttctgaaaatggaaagtcgttgatttatgatttgcctatttcgggtgtgacagatttaattatcctgccaaatacggaagagataacagatataaaattaacggtgactaagcagatttatttgaataggacatttgtttgtcagaatgtggctcttttgaataaagttgtaaatcaagattcatttcattatccattgcgtgtgatgggtgagacaggtgtgaatatagtgatggaccattgtaaaatagagaatctagttgttactaagggatttgcgatgggaggtgcgtctaaagctacattggataattttattattaccaattcggacattgaaatagcaatgggcggaagcggtttctacttaatgactcaaatgggaagtaagaatgttaatgtcgaaaataacttaatctataattcttctgaaacagatgtactggaggctaaaatatgcaatagtaatttgttaacaatagagaacttaaacttggcatccaatacgcttattgacatagaatcatccggaacgagtgtttacggacttattagagggaccgtaaccaatgcgactgtgaagaataatctttattggttgtctaaagctaagaaaggagcatttttcttctcaggaaatgcttctacggtggctaatttaaatgtcggcaataactatggatattctagctcagggaagcagttgcgtatgtttcagagtgctgcgataaatccggatattgaattagtggctgatttgtttgcaactttcgacaaatcaaccggcacatttgttcctaaagatgaatataaagcctacggtgctcaacgttaaaactaagataatatgaaaaagatattaatactactattaagcctattacctgtcattacttttacagcgtgtgatgataaggatgatatacgcaaagacattgatgaactgaatgctcgcttggacgcattaaccgataatttggaaagtctgaatacaagcattaaatctttccaagaggctatgcagggaattgttcttatcactgaatattctatggatgagaaaggcaattataccttgaaaatgagtgatggtatggaactgactgtttatagcggattacctgacgaagatataccggtattgggagtcagtgaagacggttattggacctatactctcaatggtgaaacaataaaattgtctagtaaggcaaagcctgaagacggaaaagacggtgaaacgccgacgatctcaattgatgaagagggctattggtgctataccattgcaggtggcgaaacacagcgtatcggaggaccttataacattgcggatattacaaagattcccggaagtatatttgcggatgtggtggttaaggataatgtaatgactttttcttttgcaggaggaggtacaacagatattcctctgttgggaggactgaatatgacttttgcagatggagcaactagtctgacctctgtaacgattgcgaagaatactctgaaagagttgaaagtagaacagattaatgtggataagataatcattgatcctacacctctgatggtagatttgaccgatacgtcattgactattcagacgacaggggtagatccgggagtgtatgatgttcattttcagatattctctaaggagggctatcgtttgattaaatcgttgaaagtgacagttagtgaataagtggaatcaataaagtaaagaaattattatgagatactataaatcattcatattattcagtttgttggcactagtctttgttgcgtgtgacacagacgatttggaaaaggacattgatgccttgaaagaccgtgtggcgagtgtggaagcacaagtacaacggttgaacgatgagatgaatatcttgcgtgtagcattggatggcaataaaacgattacagattattccattgatggtgacacctatacgttgactttaagcaatggtgagacattgacattgacgcagggcgaggtaggaggtaattatccatctattgatatcagtgatgacggttattgggtaattgccggaagcaagaccgaatggcgtgctaaagcagaaaacggtgaggatgcgacgataactccgcagtttaagattgaagcgaacccagatgctgatggcaagaagtattggcaggtaagctacgataatggttctacttggaagtttttggaaaatggcttagcagaaggagtaaatgaaaatactccgttgataaataaagtagaggtgaaagacggctgtttcaatgttacgattggcagtgaagtttaccaaattcctgtagtgaaaggtttggaatgtgccatcaatgttccggaaagtgtggctgacggggcttggatgatagctggtggcgttgaggcttcttttacagtaaaagtaaatttggcagatggtgatttggttagggtaagtgctccggcagattggaatgcgaaagtttcagagtattcagccggtactacggaagttaccgtaaccgtaactcctccttccactccgagtgaatgtacaattagggtagaagtcactcatggagtaaatacagctactgatcaaataaaggctaaaacgatttcggacagttactgggcggagtatcaggctggatttgatatcaagattggggatgtggtgattaataagtttgattatccggatgcgaaactacttcaagatggtgaaactgttcctgctacaggtgtttattttattgcagatggtgctactgtgaaaaaaagtggtcctgttactgatttagttttgattgcagaaaggaaagataataaatattcttctaaaatatctaccacaggtaatatctctttaggaaatttagcagaaggcataggcttcttatgtaaaggtgtttctttgtcatcagaaggaactagtagtgtctattggtttaatctatctgggaatataattgagagattgtattttgatcattgtagaatcgagtttatggtagacaagaatttctcaaatttcaataacgctaaatctggtataaagaatttattgatagaatcttgccatatagcgataccggcacagcaagctaaagaagatcggacagccttgtttttaagatatgatcaaggacaatatggcaatatgacgatacgtaataatgtattttactgtacaacagaaaataaagcagtttcattagctccattaatgacaacagctaaagccactgtgctggatggaatagatgtttgtattgagaataataccttgataaatacattattgaatcatgataactctacttctggtcttatgaagataccttataggaaaggatggaagatgaagaataatttagtttggtatgatgtagctcttatagcaaataaaaatgcaacggctagcttcttatcagaattaggaagtatggagacttttgatattgaagatatctccaataacaaagtattcacaactattgaagacaatccgttgatatggggtatttttagagataataaggtttttgaggataatgttataatcccggagttaacaactccgtttgttgatggtacacttgttgataccgaaggtaaatacactcttaagcctgaatatcaaggcataggtgcaataatcgaatagttgttgcaacagattagaataaataaaggagagtctgttggcatgaatagaagctggcagattcttcttttcttattgtaccacttaaattcgaaaaacatgaaatatcgtttacactatttggctacttgtttatttattgctatgtcatttatatcttgttcagatgatgaagtaataagtaatcaacctattccagagcaacctgaacagttaacggagcttattgctcaatacaacactaatatttccgcctatcaggccatgatggataataaagcggagattgttgattatatcactgatagtaaaggcttctataaattgcaacttagcaatcaacagattgtagacgctaatgctcaggctactgaagataaagatattcctcttctgagtattgacgaagatggttattggaattatctgttaggcgggacttcagctgtccttactgacctgcaaggaaatcctgctcctgctttaagcaagacggggaaaggtatatttactcctcaaattgcattaggtaaagacggttattggcaggtttcttacaatggaattcaatggaaacgtttaggtgataatattgctccatcgttggctgagaaaacggctgctaacttttctctttatcgttccgttattttagatgaagtaaccaatactattactttagaatctcgtgcgggtaacggtatacttaaactgaatacggttaataatggtacggcacaggcatggaagaaatttttaatgaatagtgatgataatgtgttgctggattattcgtatgccggatatgatcacggtgaaactgctcctaaggatggttttgcttgggggtataaggtttgtaatgtgaaacaacgcatggaacaggagaatattcctgctttagaagcttttactcgtatattggatgaaaataaacttattcgtaaaacgactttgaatgctactaatgcgaatgccaagattgtgatttactttcctgcaggtgagtatgttctgcatgaagaagctggaaagaacttcccttatgatattttaggaggaaacttcattatcaagggggatggtcctcaattgactcggctggtgatgaaaacgccgaatggagatacggaggctactaatgttcctatgttaagtatcaaacatactaatagcccgaataatgcaggacattctccgttattggcgaatgttgtagaaaatgcgaagaaaggtgagtctaatcttgtggtttcttcaactaccggattgaagccgggtaaatgggtacagttacgtttgcggagtggtaataaagatttattggcaaaagaacttggtcctattaccccgaccggctcgtggtcaatagaacaacagcctgttcctattacggcagagaaatctaatgataattacggaattaaagttacggaatttcatcaaataaaatcagtcggtggtaatcgcgttgttttctatgaaccgattatgcatgatattgacacccagtatgacgattgtttgggttgggaaattcgcgaatataagtattacgaaaatgtgggaatagaggatttaactttcgtaggccaggcaatcactccctattatcatcacggtgatggtgcaccgagtaacgtagatgcatggcgatatgatcaagaatatagaccgatcgctatggtacgattagttaattcctgggtacgtaatgtagattttgagagtgtaagtgaggcgttgactatttctgaatcagccaattgctctgcctataatattgaaatcagaggtaatcgtggacatggagcagtacgtgctgccggttcgacacgtatattcattggtaagataaatgatcaaagcaaagatggaactgctaataaatacggagttatcggtcaagggcagtggcatggatgtggtgtttccaaaccaagtattggtaatgtgatttggaattcgaactggggtagtaatgcttgtttcgaatctcatgccacacaacctcgtgctactctatttgataattgtagtggtgggttggttcgttatcatgcaggtggcgcagaagatgaggcgccgaatcatttgagtgatttgactatatggaatctgaatgtgaccggaacaattgatgaacagaagcgagacttttctactaatttcacttggtggaataatacagataagtggtggaagatttatccgcctatcgtagtcggtactcatggccaggccgtgacattctcacaagaggaaaaacagcttacttatgaagaaagtactggaacgagggttactcccgagtctctttatgaggcacagttggaaaaacgtctgggagcagtaccagcttggttaagggctttgaaataataatactggaataaatgaataatttcgtaaagaaattccggcaaatggcacctgtgataagtatgattatatcacaggtgttgttgcttggatgtaaggatgaagactcaaaagaatatatcgaagggcagattccggagacggaggttgctgcgtatattgcacaaatgaatcaggatattgctgatatgcagcagttggcagatggaaagttgagggtgctcacttatttccaagaacaggacaacgtttgggtaatggagttggagaacggtcatattctaaggatctatccagaggtagggaaaaacgaaaaaaaggaaattcccatattggggattaatgaagaaggatattggatatacgagttctataatacggaggacatactgactgacgtgaacggtgagccggtagctgcccttgccaaaacgggaaaagggacatttgtaccacggttgaggctaaatgaaaagaactattgggaagtgtcattcaacgggatgcaatggaagcaactgactagtaggccgacagatgtgatatctactacatcggctgcttattctttaatgaatggacttgtcgctgatgaaaaaaataagactgtcggtttgtctttgtgttgtggagagttgataataacttctgttgtgctgggaaaaggtactactgaagcttggaataaatttgtgttaggaacttcggataatgttctgctcgatttttcgtatgccggatatcatcatggggaagtagctcctccagatggcttctctttgggatatgaggtgatgaatgtgaaagaacggatgaatgtgaaaaatctgacagctcgggctgcattgattgatattttgcaagagaagaatctgacccgcaagaatgatacaaatggcaataatccgaatgcccgtgttgtgatctatttccctgaaggagagtatgtgttgcataatgaggacgataatggtatgagagagccggaagcgggaaaaacgtatgcaacagatagtaaagggaataatacaagttatagtattcctattactggcggacatttggttattaaaggtgacggtccggataagactaagttgattatggcgactcctaatttgcctggaagtacagaggtgatgtattcatccccatgtatgcttgaactgaaacataattcggatacccgcaagatgtgcactgtaacctctgacgcaaaaaaaggtacctatgtggtagaagtagatgatgtaaccggtttgaacaagggtgattgggtgtgtctgtatttaaaggataatacttctgaactggtagataaagaattgtctccatataaggcggaggcaacgatgactaatataatagagaagggtgtgcagatacaggatttccatcagattatagctaaaagtggtaatcgtattacttttaaagagccgattatgcatgaagtggaagcacgttggaaatgggagattcatcggtatccgcattatgaagaagtgggagtggaggatttgtcttttgtgggacaggcaaaagatgatttcaaacatcatggcacttgggaggacgatggtgcatacaagccgttgaatatggttcgattgactaattcatggatgcggcgtgtgaagttcacaagtgtgagtgaagctacttccattatcaatagtgccaatgtgtcggcttatgatatcacgatagatggtaatcgcggacattccgctatccgttccgcaggttcttcgcgtgtgtttatcggtaaggtgacagaccgtacggatggattgttgattgatgatagaaatacacgtgaggaaggtgccgggcaatatcacgcttgcggtgtttccaaaccgagtatgggggcggttatctggcgtgtgcattgggggaaagacgcttgcttcgagtctcatgccacacaacctcgtgccacattgatagatgcttgtaagggtgggttcatgcaattccgtcaaggaggtgattatgatcagttgcccaatcatttggatgatcttactatctggaatatgtattcggagagatcccgaacggcgagtggtaattctgctccttccggagtattcgactggtggcgcatcggttttaaaggatggaaattcttgcctccgacgattgtcggttttcatggcgatccgttgaattttgtacaagagcaggtaaagcttgacgaaagtcatggtactccggtagagccggagtcattgtatgaggcacaattggaacgtcgtttgggttttgtgcctgattggctgaaagcgttgaaataggtataaagaaagctactacaaaagataaataattatgaaattgaagaactggattggtttattaccattttgtgtagggatatgtctatccccttatactatgggtaatgtccacacaaactattcggcacagacagaaatgtcagtgtctgatgtggaagtgaagaagaaagagttgaaggagtttaggaaaaagtataaactgcccgttccgaaagcgaatcaaaaggaaatagatgctgctttgatgcaagtgcagttgtaccaattggagcgggtaaatgagacaacggttaccggtgcttcaatattaaataagggtaagataactcttcagcagggacgggatatcgctaaaacagtgcgtgcattggcttttgctgcccaacgtgacggaggtgaggctaaaaagagttttaatctctatctggattttctctttacgggaaatatcatagagagtattcccaagtataagtatagtaattatgatgatgtacgtaaagtcccggctgatttgctgagtgcattgtccgtatgtgatgatataagaagaggaaggttgattgctgctgtatggaacttattggaggccgaatggctgtatttgaatgcggaagagttaaaattaaaggtgaactctgattatatttataatgttgttccgcacttgtttatctgtgtggttcacaatccgaatgatgagcaagctatcaaagatttgactgccttttctcatttcctgtcgggatgtacccagtacagccctagcgggtatgatatactgaaacctgacggaacaggatttcatcataatacccattataacggatatatgtattcatatcgcacttgggtggaatatatgggacgactgaaaggcacttccttccgtattgagaaggaggcgtatcaacggatgagcaaagctgtggttagtatttatttgatggcggtacgttctgaatcggataaagaccgttattttgcgaatagtatggcgggcagacacccttttaccggtttggggattaatttctcgcgacaattgtttgagacattgattgaagtgggaggagatgtgctagggattccgtatgatcaggaattagcttcttactacaattatttttataagacgaagaagtataaggacgctcccgaactgaaagcggatggcttttatcagtttaatttcagcccggcaggagtttacagacagggtaattggctggcagtgatgcgttgtccgactactaacttttggggtggagagatatataataaaaccaaccggttcggcagataccaaagtcatggaacgctggaaatactttatgaaggtggacttgccaagtgtggttatcccgctgataaagaaaagaagagtgccggttgggactggaatatgatgcccggaagtactacagtacattatacggattggaaggaaatgacgcctaataaaaatgatgctgaccgtttcgaccaaaaatcaacaacgactaattttgcaggagcattggcttggaaagactgtggcctttttgcggctgctttcgatcaggatgatcgttggggaagtcgtcgttttgaaccgactaacctttctttctgcaagtctgtatttgccgttgatggaatgttgtatagtcttggtactgatatagaggcgaaaggcgactattcggatgaatggattactgctacaaatcttttccaatctattgtatctaaagaatccggagatatgactgtaaacggacagataatgaaagcaggaaaagaacagattatagaaccacaggttgccgcttggatggttactcctaccgctaccgggtattttgttccgaaaggacacgaccggttggtgattaagtacggtgaacagactactccttcatcagcgggtatggctgccggaatgggaaaggagactgctgcaaaggcttatcttcatcatggggtgaagccggaaaagaaaagttaccagtttatggttgttccgggtactacttccgaacggatgaaggaacttgccaagaagcaagagcaggagaaactgtttaaggtcatcactgcacaagattctgtgcatatagtgaagtatcttcctacatctaccattgcatacgctctgtttgctccggtctctaatttatcggcgggagtggtatgtgcttctaaaacggagttactggtaatggaacgtctggataaaagtggaagcggactggaactggcgttgtgcaatcctaatcttcgtccgaaaacgattggcaaaaataattggcggactacacctacacaagcttcaatagagctgaagggtaaatggactgtgaaaagcggtgatgaaagccaaaagattacgttggaagagaatgtagtgggaaatacagtattgaagactgtattgtccgagggaatgcctgtttatgtgtcgttagtgaaatagtagatcaagaaagaatggtatgaatatgaagaagctgttaagtatattaatgttgagttgggcgtttgtttgcggacaggcacaacagtcggtagatatggactggtggcgtgaaggtcgctttggtatgtttattcattggggattgtattcagttgctgccggtgaatggaatggaaagccggtggatggcatcggtgagtggatacagaattttgccaaggtccctaacaatgaatatgagaaactggctgataaactcacgttagctaaatataatccggaagaatgggtgaaattagcaaagcaagccggagctcgttatattgtatttacgactaaacaccatgaaggcttttgtatgtatccgagcgaggtgtctgattttgatattgagcgtactccttataaaagagatcctttgaaagaactggtagaagcttgccgtaagcatggggtaaaagtcggattctactattctcatcggcaagattggcgggaagaagacgctgctgtgatgcagaatgaatatgacgggcattatggtaagccgaaatcggaagtaaaaccgaatctggaccgttatatcagggaaaaggctttaccgcaaatgcgggaattgcttacccgatacggtaaaattgatttgttatggtatgacactccgtttgacttgacgaaagaacagagtcggacatttgtaaatgtagtcagagaattacagccggaatgtattgtgaatggtcgtgtgggttataatctgggagattatggagcattgggagacaatgagatgccttgttcgcgtgtgaatatggatttggaaatggtggctaccatgaatcatacttggggatacaaaaagaacgaccaaaactggaagagcccgaaagatattctttgctcattgatagaatgtgcgagtcgtggagtgaactatatggtgaatatcggtccgaaggaggatggaaccgtaccacaaccgagcattgatataatggatttcatcggaaggtggatgcagaagaattcggaagctgtctacggaacaaccggaaatccttttaatgataacttcccttgggggtatgttacacataagggtaatgtgatttatctgcatcttttgagggaacctctgaaccgttgtattgcattgaagggtttgttgacatccattacaaaggcagaaatacttgcttccggtaagaaagtgacggtgactgatcaatcgtatccggtattgacagtgcctgctcatctgaattatgatgaaattccggtgctgaagttggtatgtaagtctccggtgcgttttagcgaggataattacatgaacgaaaatgtagtcagtattccggtggcaaatggtaagattattccgggcaaagagggaagtttgacgattgctgagggtggaaatacacaaaacttccatgcaggtactggtaagttgcagctgaaatgtgtgattgatgagccgggtacttacaaagtacgtgtattcaccagtcgccattggagaagatcatttgctgagggagctagaattacattgaaagtggatgataatactccgttcaattccgtattgatgaagaaagacggggagttgtccaatgtacgccagaactcctacccggaaacatggagtgatatcggtacggtacacttcaagcagaaaggcacaaaagggttggaactttctgtgaatgcaacaggcacgtttagccgtttgggattctttggggaggatatccagaatgagagtgagaaaaacattcgctttatgagaatagagctaatcaaagaagcctactgatgttcaaagagcagacaattctttacttttatgaaataacttttttcaacagaggtcaaagtaaaagagaggagcctcacggttcctctctttagggggttaaattgattaaagtccgattttattatacgttttcaataaggttagaaaaatcgtgtgatatattgctttttgttgtaacgcatattcactgttttatattttctacaaatgtatggattttgcgtgggtgtagtgggtgttattattcaagataggtgcaaaatcatacaaatctattattctcatatttctattcttcttttacactttccaataatgcggataactcttttacaatctcgggatgtgacttcgctacatttgttttctccgatgggtcggatgagagatcatatagctgaggctgcttgtcattacccagttccatctttgtccagaattcaatagcaggaccatcgcttggttcaatatatttccattctcccttaacaatggcaagtgtgttattcagattttgttggactacatactcacgacctgtattgtttttgcctaaaagcacatccagatgttcctggctgtcgggggctgcacccttgcgcaagggctgattcagaagcgaagcaagtgatgcgtaagtgtcgatctgcgagaaaagcgcttgttgtttggaaggctgtattttagcaggccagcgaatgataaaaggaatgcgggtaccggcttcgtaagcactgtatttgccaccgcgatagattcccattggagtatgaccattgagattctcgtaggcatagtcctgatagccgtcgtcgataacaggaccgttatcgctggtaaagatcaggatggtgttgtctgcgatgtggaggctgtccagtgtgtgcatgatttcaccgatggtccagtccagttgcaggatgacgtcgccacgagtgccgagcccgcttttgcctgcgaaacgtgggtgggggatgcgtggtacatgtacgtcttgcgtacccatatataagaagaaaggttcttcctgatgggatgcaatgaaattcttagccttatgagtgatgatatcggctatgtcttcatctttccaaagggcggattttcctccggtcatccaaccaatgcggggaatgccgttgataattgtattgttgtgtccctggctgggttttaaagtgacgagctctgggttctcttctcccgtaggccagtcgccgactttgtggtcgtaacttacggtgataggatcattggggtcaagtcctacgacatgtccgttttctacaaatacacaaggtacacggtctacggtagccggaataataaattcgtagtcaaaaccgatgctttgtgcattaggggtaatccggttgttaaagtcggttccacctttcggaccgagtcccagatgccatttgcctactgcaccggttgcgtatcctgcatctttcagcatatctgccatggtgatgcaggtagtgtcaataatgagttcagagttgccgggagcgattcctgtgttttcttgtctccaggggtacatacctgtcaggagtccgaaacgggaaggagtgctggtggcagaagttgcataagcattggtgaattgtactccttgtcctgccaaccggtcgatgttgggagtactcactttcgttgctccataacagcttaaatcaccaatgccgagaccatctgcaaatatataaataatgttaggcttttggttgttctgcccattgctcttttggggtgcatgactgcatcctgacagcgtgacgatgccggacaataggggaagtagacgcgaaacgtttttcataatgctgaatgttttaggaaataatgtaatgaacacaaagataagcgaatggaagaaaaagaatgagtaggaatgtacaagtgaagtacaaaatagtacacttaagaagttaccttctttattcgggcgaagatgtccggactaagaaaccgtttatatcataaatttaggcacggattacacggattaacgctgttgttttcatactcatcgttttttaatccgtgaaatccgtgtgatccgtgcctaataatataagattattttgcaagagtgcttgtatagttgcctgctaatctgtttcttctccgtccccttcttcttcgctctcttctcctttacgataagccagcggactgacgtgataaatctccttgaaacatttactgaaatagcgggaggaggagaacccaatccggtcagagatctccgtgatattcagctccgggttattccttaacatgacagcgccttttttgagacgtatgcttaggatgaaatcattcggggtctggcctgtaactgctttcagtttagtgaataggttcgtacgtgccatacccatttcgcgggcgaagatattaacgttgaaatccgtattgtccagatgacgttcgataatggccatcgcgcggtcgagcatctccttatccatcgggttggtagccaacatttgggcaaaagcctgtggttgtttgctgaacttctcttgcaatagccggcgggaattaaccaggttattgcagcgggaaatcagaagattggtattaaacggtttcgtgatataatcatccgcaccaatcttcaaaccttcgatattgtgctctatagcagtacgtgcggttaataataccaccggaatatggcaagtgttaaagtccgtcttgatctgtttgcaaagttccgtacccgacatgcgtggcattacgacatcacttaaaatgatgctcggcatatccttctgtatcatctctaatgcttctactccgtcggaagccgtactgacttgatagaatgtttcgaaaataccgactaacatctgtttgatagattcattgtcttccactatcagcattttggcgtcttcgatgcgcttgttatcttcttctttccattccgaatcagggattatttctactgaaggaacaatagtctctgtttgctggatggtttccgtatcatctttcgctatttgctcttctgtgaagtgttccttgcctagtttgagggtgataatgaaactgcttcctttgcccggttcgctttctacccggattgtgccgtgatgaagttccacaataccttttgtcagtgccagtccgatgcctgtaccggctccggtattcagcgagttgagatgttcggtctgatagaaacggtcgaatatcttatcaatttcggcagcggcgatacctgtcccggtatcttttatttcaatgatgacatggtctttctcctgcgatacattaatcgaaattgtatcttcggccttggtatgcttcactgcattagacagcaggttgtttatcactttctgcatctgcttttggtcataccatacttcaatgtcatccttctgtttgttgaacttgaagttgatttgtttactgctcgcatattcgaggaagagcagataattctcatacaggaagttaaccagattgtgctggctaactttgatcttcatgtgaccctgttcctgtttacggaaatcaagtagttccgtaatcagttcccgtaattggagactgttcttgtagattcccaataccttattatatatattaggcgtaaatgtctgcacctgcaacaaagtttccacttgtcccacgatcagcgttaacggtgtgcggaattcgtgcgagatgttagtgaagaaacggagtttcgactggttcaatgcttcgaggtcttcaatatgcttcttttcgtacttcaaagactcacggagtttgatgcgcgaattatagttctgaataagataccataacaggctgatagtgacaatggtataaatcaggtaagcccaccatgtctcataccatgaagggagtacgataatcagcagtctggcctcttttattccttccctctgtgatttgatgacaagggtatatttacccggattcaggtttgtataagtaatcagcgtttgcttccggtaagtatggttccattcgtctgagaaaccctccaggcgatagagaatttcatctctgttggcagggatgaagttggaagtggcatattcgatgctaaacatcgattgattcgctttcagactgatttccggagtatgacagatcgactgttccaggataccgctttcatctcccgggactacttcttttccgttgacaagcaggcgggaaagaatgatattatatgatttgggagtgaaatgtaattttttctcccagaaagaaatcattccctgaataccgccaaggaatacttctccgtcatgtgtcacaaatagtgcgttttcattgacggcagtcaacgggaatccattctccgtaccgtaattatagaatttcttgcttggatagttgaactgtgagaatccctgattggtaatcagcaataagtcgcctttctgtatggacgattcgcatacttcgtagatacagtcgctggataaaccatctgtctgtacatcgaagttttcaaagtcatcacttgccttacggtaacggtcgagaccgcttccggaggtgcagaaccatagattaccgttactgtcctgcatgatactgttgatattattgttgctaagactgttcggattagcgggattgtgcggataattagtaagtttaccgctgtcgaaccggtaagaataaacaccctccccggtagccgcaatccacaatgtaccgtctttatcaatgcaaagactggctaccatgccaatgcctcttccttctttcgtctctttgaagagttgttggcaagcgcctgttgccggattgaaaagacaaacaccgttttgtgtggcgacaaccagcttgtccttataaggtacaatgtctcggacgatatccgaaggtagtgaggttgggtctccggctttcatccggtagactgtgaaacggttggtacgcaggtcgagtttgttcaatcctcccaagtgtgtacctatccacatgatttcattagtctggtcgtagtagattgctttgacattgttatgggaaatgctatttttgccctcttcgtggcgataccaccgataggtgttgtttttccggtcgtacacattcacgccaccgccttcagtacagatccataagtttccgtctttatcttcagtcattctgccaacaatcgggctacttaaaccttctttttctgtatctcccgtcttgtagcgggtatagatttcatattccggattgaaatagttgacacctccgaaataagtacccagccaaattgttccttgttcatctttgacgatgcaccagatggaggagtgggtaagtccgtcgggtttgttcgcgttggcagtgtaaagttggaatttacctgtgctcttttcatagcgatttaacccgtgaaaggttcctatccacagatttcctgcattatcttcacagcaactccttacgaagtcggtgcaaatactgtttggatttttaggatcatgacggaagttctcaatggtactatctgtttttatccggtagagtccttcttcccaggtacagatccataattctttagacgaatcttcgtaaatactcgcgatattacctcttgtgacaggttgggaaatctttttgtctcccgataaacagtaaagtccgttactggtagttcccatccacagatttttcttttcgtccaggtggaggcaggagagggtgatatcttttccggcaagatgatagtagagatcgaagtttccggtactttcattatatacaaacacttcttctcttttcccgatatataatttctcgttgaaataaatagcatccacattgccttgcagcaacgttttgaatctttgtgtggtcagatcgaactctgctaccccgtccgtacagagcaggtataccttcccgtttttgtttccggtgatacgcagcactgtattgctgaacaaactgttcggatcgtttttattaagtttgaaacttttgatatcgttaccgttataccggttcagtccttcacgcgtgccaatccatataatcccccgttcatcaatataaaggctattgacagaaaattgggagagtccgtcgtccgtggtcaagtggctaaaagtgatgttttgaccttgtgtgcggactccagctacgcttaaaaatagcagaaataaaagaattacttttctcactaatttattttttaaggtgtttacatctatgcaaatatattgtttttattcgatttcagtgaatcttattagaagaaagtaactataaaacaccggaagagaattctatttaacagaattactcttccggtttctaacctaactaacctcttgttatagtgtttgtgcctgtttcgtttttatcagttcagattattaccacactacatactgattgaaaaaacgagtactttcagcaatccatgagtccatgttctcataagctgcaaagtgtcctgatgtagggtaacatatccagcgtttaggtgtacggatgtgattgtatgctgcaaaatttgtatgtggtggtgtaatgttgtcctgaagtccgaatcccattaatactgggcatttgatccatccggtcagattcttcaagtcaaagtaagttagtaatgagaatattttatctttgtcaatattctgccgggcagctccttcgaataccaagttggcaggccagtgaaccaaacggaaataatcgggatagtctgacagaaagggtacgataggcgcagctgcggaaatacgatggtcgagtgacgctgctgctaatgtgagcgctccaccttgcgaaatacctgtagcaaaaaggttttgtccgtcaaagcatggctgagcaaaaataaaatcaatactgcggactgtatcagcaaaagcacctctgtaatagtaatgtttgggtgaatccagtccgaaagcaatccactcaccaaagcggttataaggtttgttgaggccttgtccacggggtggaatgaccaagatacaccaaccgggatagtcgtcgggactgggaatccaggtgacggcatcataaccttgataaaccactatggccggatgactctgaccatctgtagggactgcccaatacccccgtaagatttctccttcaagcgagcgcatttctacttcgtaaacatcacgctctggcttcgaagattcaggtagacgtgtcattttataggcagggtgtacacgtttaagttcggtgatggttttattccaaaatctttttaagttagggggaccatccggtttggataaaatctgttcggcttcgtatccaaagaagaaatgtttcagagtgtcggtgccggcaatgaaacaaacctggtaaaatccgggagtgagattcgtgagagtgactgatgcacgactgcgaaagcctccaccgggagctatcgaatctgttccgaaagagtaggttataaaggtagacgatacagcattgccgaaatctgttgcaatgtccatgcgtatcctatccgaaaaacctgactgtgcagatgtcaattccagcatgaagcgtactggatgttcgttatcgaacatccagttttgctcaacaggaatattgagatttatggtctcctgtgtataacttcttattgagtatccggtcaggagtataatgacgtatatccacttttgcatcctgttaatcattgtaattactctttgatataaaacgtaatgagcactcctttatgatcgcttggccactgattgtttacgggcggaatgattggatctttggtttgttcttctattctttgtccgcgtacaatagagcctgttggacctactatctgggcactttttatttgtagatttttatttggataatagtaaacgaaatcaattcgttcgcgttcatctgcctccggtgcccatgagagattctctggaatgactgatttattgtctgctggaaaagtgaatcccggacatttcaccggatcgggatgaattacccggtaggcatctttatatccccgttgaaccaacaatttggaagttccccaattgacgatacatccgcgatgatcgaatagatcttttgtatcggcctgccaatccagataagaaggctcattcagatctccggcaaaaaatacgagtgctccttgctctagctctttggcagcgttgttgataaaagcttgggcggattctatacggtctgattcttcgcagacagcaagtatcttgtttacatcagtgataggagccggaagtttatcccaattaacgctaccgtcattgtatccccggggatagtaacaggtgtagtaacgatactctgaatgtgccgggtaaacggccactcgtttcccattgacatccagaatcgctttgaacatccatttgttgatgcgttctgtctctttgatcggatattttgatatgaccgctcttccgtctattcgtgcatcgtaatagatgagtcccttatctttaagcccttgcattagtttaggcatcacgggatcgtcttgtggacctttatataattcgcaaaatgtagcaatgtctggctgtagggtagcaatctgttctatcagatattccggagcatgttccaccttggtacactccacccataagttgagttgaaggaacttaatctctgttttctttcctgtttcttcttccggtacagatacttccgtatcggttttagaacatgcagtgataacaggaagtatggcaataataatagttaataaccacttttgcataatctgtattttttagatttgattaccagcccggattctgacagttagttcctgaagcattctgtaaccggattgcttcgtcacccggtattggatataataggaatttttcactatatgcttttcggttattatctactacaaaacgggagtaacttccatctgagtttgctttcattccggtgattactctatctgtttgatccagtatcttccaacggcgtacatcaaagaagcggtgttcttcaaaagcaagttctacgcgtctttcgttcctgattcgcagacgaaactgatcacaggataatccgtaaggaatgcctggcatacctactctggaacgtactgcattgactgcgtctaccgcatcattgggtacagttccggtagtggatgcttcattagctgcctctgcataattcaaatataattcagccaggcggaactctttgaagtagccatccagattgccggaacgtccggatttataatgcgagaacttacgtgtataatagccggtacaggtgtaacgtgcattactgggatcaagtgcacagtttcctcctgtcttggttgagagtagtgcaccggtttccaggtttagtttggaaccatcataataaatagaagctttaagacgcggatcacggttctcatacggtttggcttgattgtagagaccttgaacagccgaattcaagttaggctgcagatgattggcatctagataagggctctctaaattgagcagaggataagattctgtcatgtcaccgttcacaacttcataggcatcaagtagctcttgcgacggacacgcaccggcatctgtctggccgtcggtagttggcaggccagcataattccacatatacatttgtccaacttccataatggtttctttgtcattaactaccggcaagtcagtgcgcgaatagaaatacacatcataaggagaataaccagctgtagcattcggctgtttcttataaagttcataattgttcgccagacagtcatccagagactttttagtaatttctgcggcttctgtccaagtgattgttccgtcattgtacagaggactggctgcatagagtgatatctgtgaacggatggctgcacagatggcttttgtcataacgtgacggtagttctccttatctaaggaacgccatccccattcttcaacagtgggaatatcaatagcagcctgacaatcagctaatatttggcgggcacactcgccaaatgtacctcttttaaccttggtataatcgtagtcgggagttgttatgatgggaacacctccataacgtttcaccaattgaagataatagaaagcgcgtaatgtaagtacctgtgccttgaaactgttacgtatatcttccgagtagacactggcagtagggatattggcaagaaagatgttgcaggcacgaatcccttgataataataattgtagttttccggatttccttcgatgccctccagcggattgctgaagggagataattgtccttcattccatttgcgggtaactccgttctgtagttcccaggaatctttggcttcatccgtacaaccagctagcatggtatagttatagttcattccgtaattcagaatccatccataacattgattcatataagtatacgttttacggttcgtggtaaacaaatcgctgtaatccgtacggccgtccggatgatcttcaatttcagtacatcctatgaatgaggataatatgagtaaggagaatactcctgatatgattttatttattttcataacttcagtctttagaaattcaggttaagtcctatgttaaatgttctgtaaatggggtatacagagtaggaatattgttccgggtccagattatcgaacttgagagatgaggtggtcaacaaattggctccgctgatatagaatctcattttctccagtttcagcttactgctccaacgtttaggaagtgtataacctaatactacattcttcaatctcatatagttatttttggaatagaagaattcattcgattggagacttgaagagcttcctgtggtcaaagccggatagctgattttttcatttgccgcatagcgatctgctgtccaggcattacggtgcaggtctgtgtacactccttggtaagcattatcgaagataccgcatccactgtaataggctgctgtacctgatacaccttgtaactgaacatacaagtcaaagtttttgtattccagttgaatagaaccaccataagaaagtgtaggtagtgtctgggctttgtccatcggtgcctggtcacgctcatctatatttccgtcgttatttaagtctttgtaaatgaaatcacctgggcgcggagaagcaccagagaatcgcagaccgcttttatctatttcctcctggctattatagtagccgtttccgttggaatagtcaatcagatatccgaactgttgtcctgcagaatagccggttttacgatatggatagtaatatccgctggcggtacggttcaactcttttatgtcagttacttcatttttattgtatcccatattccctctgatagtcattcttaatccacatttcagattcttgatataagatagttcaagatcaaatcctttgttgttcatcttacccagattttcaaatggcagattttcactggcgataccttgtgcagaagatacactgttattttggatagccatttgggtctgtttcacgttccaataatcaaatgtgatacctagtgagttgaataaggtaacatctattccgtaattttgctggaaagattcttcataatggatatacggattaccttgcataccttctacagtatgaaagccatagtagttgcttagtaagtaacctgaatctttataacgtacatctgtagcatacaggaaacgggtgtcagatatctggtcattgcccagccagccggcagatgcgcgtattttgaggaaggacaaccaatctgtgtctttcaggaaactttcgttggataccacccaagcggcagatactgtcgggaagaatttaaaacggttacccggtttgaactgttctgtgccatcataggtaaagtctccctgtatatagtaccgtgaatcatagccgtatttcacatgtcccattaatgacaaacgatcgtatgggagatcaccgtttttcatcatattctcattgaaatagctgacaaatgcatctacttcatgtttgcctccaaaaatacgattatagttgatgaacccttggaagttgataaagtagcgcatattagcggtcttacttaaacttagaggaagagtggtgtgagtaccgaaaagtccgctgccattggctgcataacgtgcgtagtcagtagaaccatagattgttccgtcatagtttgcttcataacctactattccttttacgctcaatcctttagtcaggaatcccagatccagattcattccataagcgacgttcagattgatacctgtttgatggctatatccggagcggttgataagtccgtaagtaggatattcattgtattctgcagtaatcacttttccgtcttcggtgataggtccaggtacagtgggggccatctgatagatcgaattcatgatatctcctgtcccgttgtatccttgatttatccggtcgatagtgacatttgtgttaaggaaacagtttagataacgatgcagagtgacgtccacattagctaaaatgttgaagcgatgcaatttgagtgcaggattataattatcattcttctctgcatcaatcaggctgttttggtgaagataaccggcattaacaaggtatttaacccggttgttacctccgctgatatttacgttgtaacgttgcatactggctgcatcattcatgaaagtgtcataccagtcgtgtcccggcatagttccatctgtaaacccggctatttcatataaagaatagagtggagtgccaccgtcattgagtaaggcctggttacgcatttgtgcgtattcaccggtacttactattttaggacgctgggtagcctgttgtatggagaagtccatgttcacatttactttagtacgtcctatttcgcctctttttgtagtaataagaattactccggaagaagctcgcggaccatataatgctttagctgcggcatctttcagaatactgacagattctacagtgttggcatcgagtgtattcatatcgaataatggagccggaattccatcgagtacaaccaaaggtgaattaccgtttatggaattcagaccacgtatatacatcgttgttgcatcatcggttggtgtgctggtggattggatagaagtcaatcctgccaagcgtccggtcagcgtagctgaaaatccgctattaggtgttttaactaactcttctccctgaacggtagagattgctcctgtataacctccttttctctctttctgcagcatggctacttcgagagatgtatcctgaccggcgatgtctgatatcagacaaaactctaccggtttattcagagtgaatttcattgtctggttccgatatcccggaatcttacaaatgaccatactggctcccgacggaatctccatgatgaattttccgtctttatcactgcttgtggtgtattcgggattgtccgggacagaaatgattgcgccgtctaaaggttcgttgctctcattccgcaccacaccggatataacttcttgcacttgtgcccggcatacttcattgcctgtgaacaggcatacgatgcacaaaagtgtgattattctgtttttcatatacattctgttttatgattaccatcctgcattttgccacgtctgtcctgtcgtgccttccaatacggctgcttcattggcagggataggatatacgtgccatttcttttcataactcattttgctcggtttgctgccgtctgttcctagattgattctttcataagagaatgagtttccatttttggtgattctcatacctgtggtaaacttctcattttccatattctcattggcgggtgtccaacggcggatatcgaaatatctgtcttcttcacaagccagctctatctggcgttcgtggcgtaccaataaacgagcttcgttcttgtcgtttgtcgacagatcaaccgaaggatcaaaacctgcgcgatgacggatttcattgatccattccaggccttcggtaaggtgtccgctttcaatagcggcttcggcggcattcagataaattttgcctaatcggtaaaaacggaaacggccatcatatccagccactccggctgccttacagttaccgtttaccattctttttctccaataataaccggtacgtgtgttcgtatttccacttgtacggatttcgctatttcctcccacgtacgtttctactactgccggttcctttcctaacagcacaggactgttattataaaaaattgtagcctggaaacgaggatcacgtcccttataagggttggctgggtcataaccgctattagggttataattaggtgacagatgcttctcatcgttataaggtttcgataaatccagtacaggctttcctgttgctagcatatcataggcgtctactaattcttgggaaggaacaatagttaattgagcgtttcccaataccggagctccgataacgtcatacaaaggattggtgtatgggtcgggccaatagccttcggtactttgccagattgtttctttatcactgggatctgttccgatatagttattgagcgtaaagtactccatataagcattgttatagtacttttcagtatccgcacatttagtatacaattcatatccattggctttcagctgttccagacagtctttgttgattgtgtaagcccattcccaaagatctttgccgccattgttgtaagtgctggctgcgaatagagatgcttcggaacggatagccattgcgatacctttggtcattctgatcttctcgttgagtgttgtcagtcgccaagggaggttgctggattgcaaagctatttcgcaatcatctacaatgaatcgggcacagtcttcgaaagtaggacgtgatagagttgaataatcatagtctaacccgtatggctctttctcaataggcacaggaccataccatttcagtaactccatatagaaataagcacggagtacatgagcctctgctacccaacggtcacggtcgctttcgcttggtatggcggcggtggctgcccgttggaggaatgtgttgataatacggatttgcccccagtataactgccagtatcctccttctgagtaggtgtcacccatatctctgcgaacgtcgagatagaagtcggtggtggtacagttgccggatgcggcatgtgcaaagccggcaccggaaccatccgtgcaatcccacgcttcatcactaagtgctacgggatagttgctccagaaatgatatcgtaaactctttttaggcagatagtcaaagcaagtactgaaataagctttagtcagatcgggatcttggaatacttcgtccagtgataatcttccgtcgggagctacatccaacgcttcattacaagaactgaatgtgagcaaggaagcaaacatgcatatataaataaatctttttttcatatcggttttgttttagccgttaaaatgtaatatttaaacctacattgtacgtacgcattgttggataggctgctggactgttttgttcgggatcgaagctgtcagtcttcaggtgagtccatgtatacaagttgttaccacttaaatagaaacgtacattggaagcaccgattttcttgctgatgctttccggtaatgtatatcctacttctgcatttttcagacgtatatatgaggcatccatgataaagaagtcgttgggctgcaagctcgggccgccactgctggacagacgaggatacgtaatcttttcgtgattattatagcgttcttcgctccaacgttccatgtgcatcttgtaaaagttgccgctgctttcataaataccggctcctgaataagtcttgctgtattggcctactccctgcaacatgatagaaacatcgaatcctttccagttggcagataaagagaaaccgtagttgatgcgaggcaatagggaggaatagccaatgggagccttgtcacggtcattgatgacaccgtctccgttgagatctttataaataaagtctccgggttccggtgttcctacaccttcataagtcagtccgctcttggcaatactctcgtcgctatagaagaatcctgtgccgtcacgccctttttcaggatcatagctgtggtcgatgatatatccccagttttgtcctaatgagaagccggtggtgcgggtgcgataagcataatccttacctaatagtggctcgtcatattccaatactttgtttttggcataactgaagtttgcattagcagaaacagatagcccgtttttgaattgtttctgatatccgaggaccatttcgaatccctgattctttacttcaccatcgttcatcagtggaagagcggatgagggaagaccttgaatcataggagtagtctgcgggataatcagaatattttttcttttttcaacaaagtagtcaaatgagaaggaaagatcatgatacaaggatatgtctataccataattctgtttttcagatgtttcccatgtgatgcttttgtttcctatgtagttttcggctatcttgtaaccttgtccccaaccggaaccattggaagcatatcccaagcttggggataaccaatgatctcctttactgtcggtgactacggaatattgactgatattatccagataaaggaaacgggctgaaccgaaggcgtcgttaccaacttttccccaagaagctcttaacttcagattggtcaaaaccggattatcctgaaggaagccctcattagtaatcagccaaccgaaagaggcagccgggaagagaccaaatcgtttgtccggtgaaaattgttcagagccgttataacctacgttgacctccgcaaaataacgtctgtcatagtcataagttgcacgtccggcaataccgatgacgttgtaaggaagcagtaggtcaccggatgtttctttggattctttgatgtcccgttgagctagaaacatagcagtgacattatgctttccggcgaaggtctggttatagttgatttgtccctgtaagttcataacccaataagattcggaagactttgtgagttcaatcgggccgtcttcgtcctccaggctaggatggcgattgataaacaaatgctctcctgaagctaatgtctgatacgtataccaggtataggaacgttttccgattgttttcccaaatcctttggagtcgaaagatacctggcctttgacagagagccctttagtgataaatcccaaatctatttctactcctccgataacattgattcccgatctggtttccagttgatagcccgaacggttgattagcggatatgcactcaatgaattgttggcgggatcttctacggataatccggcaccaatagggaaagtacgtatagcatcagtagcgtatgcaccttccggggtgagatacatggaagtagggcgtgaggtcaaagcgctgttgaatacacttgacatacttgcggaagttccgttgatccgttccagataagaggaagcgtttaagttaatctttaccgacttattgactttgtagtcgatatttgagcggaagttgtagcggtctaatgaagactgggcattgtatcccaacttggatttaggttctacgttgaacatacctccctgatgcagatagcctgcacttacaaagtattgaagtttgtccgaacctcccgaaacgttcatgttggctctggtcatgggagcataatctctgaacaagatatcttgccagttattattcggataaaaatccgggtctacaggattacctgttttccatgagtcgaacttatcaatgtccggcccgaggaattcagcggaatttccgtcgttcacgagtgcttcattgcgaagtctgacccagtcccatgaatccagacgttcgggcttgaaagcgatttcctgcatgctgaattctacattggcactgatacgggcagttcctttttcacctctacgagtggtaatcattatcactccgttggcaccacgtactccgaatactgctgttgcggaagcatctttcaatacggagatattagcaatctcgttcgggtcgatagatcgcatatcgtctacagctactccatctaccataattaatgggtttgttccgtttgtagtggcagcaccacgcaggaacatggtgacttcgtcacgtcccggttcaccggaggtctggatagttgtcaatcctgggagttttccggataaagcggaacttaggttgggcgatgaggatttcatcaaatcttttcgatcaatggaagctacggaaccgatgacagaaacctttttctgggtaccgtaagctaccactacaacttcctccaggttcgctacgtccggatacatgatgatacgcatgtcttttttagcaggaatgtcctgcttttgataacctacataactgatttccagtatagcgttgggggcaaccgataaagagaaacgaccgtctatgtctgtaatagtaccattcgttgctgctcccttttccatgacggaagctccgatcaggctttcaccggactcgtctacgacgactccggaggctgttattttagactgttgctgtgtcagggtagcatctccgatatccgatgcatttcctgtaacgggaatacagattcccaacccaagcaacaggcacattttgtatagccaataactttttttcataactataacgtttaagattgttttctgtctaattaaatgaactcaacattttatccttgtcgtatcctatgtattcataacgttctatccggacaccttgattctttgcggtaatacatgggcttgtgccattccatgggctatccatccaccattcttctactagtagcttcctttgagttgaagagctgtcggtaaatgagaactgaacttttgaggcatctacagctccaccggagtaacctagtacggaataagtacctgccagattacgcagatcaacataagtgagcggacaaccggatgcatttagtgatgtgatggatttgcaccggtttatatccagatatgctaatcccggattgttgctcacatctatagaggttatcatatactgatcgccagaaatgaatttggttaatcctgcattcttggcactgaaagtctgaattcctttctcatctaccggacctgccgtgtagctggtactgattgcgtatttactaagatcgatttctcccagattatttccatccagaatgaggtttttgtatccgcagaagtattgtagtccttccagattagtgattcccttattgctaagatcaagggtcgtgttattcttgaagtattcagtattcagagcagccactgtcagaactttatctccatcgaatacatccggaaccaatgctttgagtgcgtttcgtagattgatatcaggaatttctccatactttttcattgtcttctgatattttccgtaactgtaatagtagttgttgtttccatcgggatagtcgtgcatccagtcgtacccttccactgtcactccattattgatggcatctacgatagaaccgctattgctgtagtatgagtccatccaccaggattccattttcaggagtcgttctttacttgcgtcatcgctgaaagtaaatttgaagtctgtgctgttgtagttcagacatccgccatagatactgtggtaattgcgtacatccagatataccagtttacagtttagggcagagaacttctcaatgttataacaataatacaggtcgacagattctagtttggtacttccatctatgttgagagataccaatgtcgtgttcggctgttccgaagtggctagttccagtttggtcagaccagtgttttgtgcagtcagttcagacagtctggataatacttctgcaggaatttcactgatatcattattgttgcagatcagtttccgaatgttgctgaaatattcgagtccctccagagaagtgatatttttatcgctgatatttagtgtgccatcagtgaaagtgacatatttagcactggaagatatcttttctcctttaaatatatcagggaaaagagcagacaaggcattacgcaggttttcgtcgggcataactccaacagtactgttgatgacgcctaatgttcgcattttgctaccgcgtaccaatacaagtccataagaatctttggtggccgtagaggggtaaagtaccgtgatatgatcggatgctacttctctggtttccatgtagatggactgttcggttcctcctgaaaggggagaaagagccagtacatcacagtcgataaagccatttccctgaatggtaatctctgtgcccagggattcttccgaaatatccggaagcactacattggttactcctaggtctgtgcctaacttttcgtcttcacatcccaaaaggaataccattccaagcattaataaaatgtagaaatgtgttttcataaatactatttgtttaatgaataaatagagtacatagttattcttgttttaagacgatcacagaatgagccggaagtaaacatagaattttatcgttcactttgagaggctgggcgtccggagccaacatttggtctgtggtaggtaaaccgtctttgatataacggtaaacctgataattccctttggtttgcgtatgttggttgatgaggcttattgctttctcctggtccattccattggcgaaaacatatacccatttgccatttgtgtttcgaacagcagttcctgcataccattcttccggtgttgctatcggatagatttcagctcccgggcgtatgaaacgtgtcaacagagaataggcatagtactgtgggcgtacctcgtaatcacttttgatatcgttgtagtatggttccgaagcgtatgttttctttacatacttccataaacccagttgctgcattgctccgtagtctgcatccttaccatagtattggtctatcaggctccaatagctaacaccgcttgctcctgcattgagtagattgatggctatgcgtgtcatgagtactcctcgttcatacaagtcgatatctttttgcctggtggcacctacgcattgattacctccgaattcaccgatgaaatgggcttttccaactgaagcggccaattgagagttttgtttttcccaatccagaattgtggagttcggagtttcgtagccgaagatataggtgtgggagttgaatacgtcagcaacgttcgccagtcctttcgtgcaggctgccagatatttatgcgttcctgtacctccgtctgaattgtcagaaagactgaaatgtactttatttcgtattccatcctctttgaaacgtctgtcgagtactttacacatttcaatatagtcggcggtgggagcagctttacctttgatgatatatgaccaatctggttcgttgatcggagtaatctctttgacgcacgtgtattttttgttgttgagcaggtgttgtacaagtgcggaaaagttctcgctccattcttcatagttagtcggggctactacccagttaccataattcccttcggccaggaaatgtcccggaggggctccccaaagtacaagggtgacttccattttctgttcttgtgccatatccaatactttgtagagtgattgcatttctacagggttgaaagtgaaattatgccagtcgattttggatgcatccggattgtcattctttggctcataccattgtggcatcaccatcacccgtaagctttgcagtcccatttctttgacacgtttcacaacgatgcgctcccagtcttcagctttagctccatcattgcgggtcacattttgtgagagaaagtggggatctagttctgcacctatagcacggagctttacaccggttttctttcctacagaaagtttctgtatggcagttgttgaactttggtatttgattatcagactactttgcgggttatccagtgtcagcgtgaagccgttagccagttctttaccggttttctttatagcttctcctgtatctttattggtgagtatataagtgtggtcagggtgtagccctgataaattgacagtatagctcttgtccggattgtctttgcggcggaaagctacgatgtatccgctgtcatccgacggacgataaagttggtatgctagccagatattttccgaagtaatgttgtttattccactcaacggatagtaatcttcatagaaataggggcggagttctttgaactctgcctggcggtcgcgcatatcatagatggattgtccagcttcggttattttccagttgtagataatagaggttccgaggctggaacggaaagtgaatttatcggcactcacagttcctgtaccatgcaggggaaggtataagttcaatccgtaagtatggcattgataaccgattggttctccgtaactgtagtctgttctccacatcggtgcactgcgtgagatactttcgaggtcaatacggcgtccgccactggcacaattatcaaccagcaagcccggaaagcggttcagcagatattcccagaaagaataaagtccttcaatgtatcggatttcgcagataccttgtctgtcaggttcatcattggcagcccagaaaccttccggctctatattgaaatcctggcggtagtagtctatgccattttcttcgaggaagtctccgatatatttactcatccatcgacatgcctccggatttccgagattgaatagataagagtcgtgctcaccatcttttgtccagtcttcctgtttggcttttcctctggcatccaacatccattgagggtgttgcagtgcccaagctgagcctttcataacacgctccggttcaaaccataccatgaacttggaaccaactctatgcacttcgtcggcgatggggcgtaatccttcggggaaacgaatagagtcgacggtccagtttcctacggtgttcgcccaattcttatgattggctacatctgcagagtgattgtaccatccggcatccagccagaatacttcgggtactaatttgaattgttcataccgtttcaccatagcaatggcataatctgtagtcaggcaggtatattcattacagggagtaggatcaccgtagttgaaactggtcgatattggatatacggtcggtttaccacctactttccaagtgtggtgggcttgcacgaaacggcggaactggttgtgtcctttcatccggtcggaaccgttccagaatgacaggcatacactggaagtgcggatgctctcttccggatacagataggttttcaaacgttcaattccggaggtaagcgctacgctttgctggtctgcacagcgtacatcggcaaaccaggttcctgtccatccgatggctacgataactccttgattagccggagattcaatattgaagaatggcatacgcatttgtgaagagcgtccaccttccggtctcatataaagattatcacccggagacaagattgtaagttgctggctgaaatctgatttggatgcatggctgccttcggaatgatgaaggttgaatgctcccggatgctggtagcggaatgtgatatcagacacttttacgttggcaatctccggcgtatttttctttccctggttggtgaaacggagtacccattccaccgtattgaagtcggtaaagcctttcacttcacattctacttttaatcctccggatggttcacgataagtataaaggcatttcagaaccttgggatcgtcacttttctgacgcgtagccgtataagaccagcttttgataaattcctgtgaaggtttacctccatattcgaaagagaaaggagggaccacaccgcgggcaaagtgggtggttatccattggctggtgtttaccgggcggtcgctcatgcgggctaccgtctgtcctgttccattatgagggaagagaagcagaatgaatagataatatagtattctttttttcattctttattcggtttttcgttggtaactttatattttagtaataaggaactatgtggcttttcgaggatcagtggcaactgactggtcagttcttttccctgatagattttgctctgtcggctatccatgtctgtcactgtatagtattttcccggatccactcctgaaagtctgacggtgatttttttgtctttggaggcggttctgcggaaagcaacgataataccactgtcgtccgacggacgatgcatttgataggctagccagatattatcccgcgtcatgtcttctgtacccgtcagtgggtaataatcttcgtaatagtaaggtctgatttcgtggaattctttcagacaacgttgcatttcgtaaacggaggcatttttatcggttattttccagttataaatcaaagctgtgctgacgcttgagcggaaagaatacggatcggtctgtaaactacctgttccatgtaaaggtaggaagaaattcaggccatacgtgtgacattggtagccgtccggatcgtcgtaatgataataatcactcctccatagtggtgcgcttcggccgattgtttcccagtcaatacgtcgtcccccactggcacagttgtctatgagcaggttcgggaatcggctcagcagataatcccagaagtagtatagtccttcgatgtgtcgtatctctttcattcctgtacgtccgggctcatcgttggctgcccagtagatatccggctgcatattgaaatcctgacggtaatagtctatgctgttttcttcgagcatatcgcctatatatttactcatccagtggcaggcttccggatttcccagatcgaacagtaggtaggtgtcattgttgtgttcgggaatgtcgagcatccagtcggggtgttctactgcccattgggtaccacggatgacacgctcgggttcgaaccagaccatgaatttagctcctactttgtgtatttcgtcggctacaggacgaagtcctttggggaagcgcaatgtatctacagtccagttaccggctgtgttggcccaggtcttgccatgttcgaagtctgcagcatcggtgttccatccggcatccagccagaatacttcgggcttcaatccgaactgtatgtaacgtttcaccatggcaatggcataatcggctgtcaggcatgagtattccgtacaaggtgcggggtcccgatagttgaatccgctggaaagaggatattcggcaaattttccgttgattttccgtgacttgtgtgccaggacaaaacggcggaatttattgtgtcctgccatccggtcgatattttcccaaaacatcagactgatacttggggtacgaattgtttcctgtggacgtaagtataatttcatggttttcattcccgaagccatggatattgtacgattatcttgtgcgcatacatctgcataccaggtgcccgaccagcctactcctaatatgactccctgtccggcaggtgattcaatgttgaagaaaggaagatagtccccttctgaagagcgtcctccttgtggagacatctgtttggtttcacccgttgccagagtaaccgaacgtggatggaaatcatatttggagatatggtttccgtctgcatagtgtaacttgaattctcctttagaagcgtattgcatggcaaggtccactactttcacttgttccagagtgggagagttgctcgtacctttgttggtgaagttcaatacccattcggcagcctgataactgggatagccttttacggtacattctactttcagtccgttggtaggattgtagtaggtaaagagatactttatcacatccgcttcttcggattctatcttttgctgggaatagtcccattggcggataaattctgcggaaggtttcccgtcacatataaacgagaacggaggtgtttttcctttagcgaattgtttctgaatccatttttcgatttcaggaatgtgtttggagattttagccgtcgtctgacccacggctatgatgctccacacactcataatcagtaatgagaacaggaatttcgattcgattttcttgaaatgtttcattagaatataggtttatgtggtttttatttttctcattattccgatcagatagcaccatacaatggcaagtactataattgcagataactgactgtggaatgaatcagtaattactcctaaaataggcgggaggacggcaccgccagatacaccgacgataagaagtgcagatacttcgttcgctttctcgggaacacgtttcaaagacagagagaagatgatggaaaacagattggcatatcctatcccgaaaactgctacacatccgaggataaaccagagattagtgctaatggtcatcagtatcaatcctgcgagagctatccagacgctataaatatagaatttactttctgaatatttcatcagtaggataccacccaaaaaggctcctacagtgcgggcgaagaaatacacactatttcccattcctgcatctgtcagtggtagatcacaacgttccatcaggaatttagggaaagtcatattgatacctacgtctacacctaccagcacgagaataccgataaagaaagcaagaatgtatttgtctttgaataattcaagagtgactttgaaagaaatgttcttccgttcctgttgtttttcttgtataggggtaagccatagccatatcaaagcgagcagtgacagtccggcataaacggggaatatcgttttccatccgaaaaaactaccagtcacccaagctgccaggataggacccaggaatgaactgactgctttgacaaattgtcctagggttaatgtacctgtcaacttatcgtttgcaacgacatccgttactaatgggttgagtgaaacttgcaatagagtgttaccgatacctatcaaggcaaatgcgattaatatggcggtaaagtcatatgcaacgagtggaaggcacatagctaatacatggaatgcgaagctaagtaatacggttttcttgcgtccgatgcgattcattaacattccggtgggaatagaaagcactaggaaccacaagaaacaggatagagagatgagattaaccatcgtatcggtgagatggctgaaatcattcttcacatagctcgtggttattccgacaatgtcaacaaatcccataacgaagaatccgaacatgacggagagcatttttactatggatatttcttttttcattcgtgtacttttgatgataaattacttggttggtgggcatatatatccagcacggtggatatatatggctaacatggtgaatatatatgcccaatacggtgtatatatatccccactaaatggggtgtatatacttctatttttgtactaataccctgattgatgaacgagataatttaagttttaggttattctcttgcgtgttgaccgtttctgttgattctataagattatcaccttccggtaggcgtccttccatatatttgtagacattgtattctccattggcaccttctttatcattttccaactgtatcatcttgtctttgtctgtagcgttggaaagtacatacgtccattttccctctgtgttgagaaaagcacttccggctatcaactcgtcgccgagatccaatggatatacttcgtcgccctggcggacaaaacgtgtcaacagactatatgcatagtattgaggacgtacctcgtagtcttccttgattttggaatatacatctgggtcttcggtataagcggattttagatatttccataaaccgagttgctgcatttccgaataggaggcattacggttataatattgatcgatcagactccagtagcttactccgcaagcaccggcattcagatagttcagagcaacgcggattagctgtacccctcgcgtatacgtgtctataccatattgacgggcacttccgtatccagggaaaccgaattctccaacaaaatgtcttttacctcctgcagaagctatattttgacgttcccaatttacgagagtcgaattaggggtgttgtagtcaaacttgtatacatgagagttatacaggtcggcttcatcgtttgtgaaagcggaaacacaggcagcgatatatccgggtgtaccgtctgtattgtcagaaaggttgaagtgtaccttacttcgtattccatctgctttaaacttggcatccagtgctttcaccatgggggcgtaggtgtcctgccaacccatggtttcaaaatcaccttgccacatgatgcggccgtaacctgctatatgactgtcaggttcattgaatggagtaatttgattgatacaggtataatgcttttcttcaatcaggtatttcaccattgtggagaagttttcagcaaattcttcatagttatctataccggcaatccaacccggattaacgttataacttcgtgcatcacacaagaaatgcttttgaccattgttaatgcctgatagtaagtcgatattggtaatggctccccatacgactaatgtcactccgatattattctcctgggccagatccaatactttgtatacagattgcatttcttccgaatcaaaagtgaatttgctcatatccgcgacattaggatcgttgttgtcattggagggttcccaccattgtggctgcatcatgattcggaattgttgtactttcattttctttacccgttgtacaactatattttcccaatcttcagcctttgaaccatcattgcgggtgatgttttgtgagaagaagtgtggatccatctcgacaccgatagcatgaaccggagttcctgttgaattccctactgcaacaggataatagttgcaagccgggcaatcgtcatatttgttataatcatccgagcaggcggacattccccaaagtgtgcaaacaatactcaatagagttttactgatatgtgtcattttcattgccatattgattaaatttagtaggttattattcaaagcctaattctgcctcaattgcctgaatcagaatgtggataactttgatgtgaatttcttgtattctgtcggaatgtgctgctcgtggcgcgcagactgcaatgtctgccagtcgtgacagttcattctctccttttgaagtcagcgctatcactttcattccattgttgtgtgcttgtacggcagctttcagtatgttctcggaatgtccgcttgtgctgatggccaataatacatctcccttacatcccatagcttctacatagcgggagaagatctcgttgaacgaaaaatcatttcccacacaggtcatgtaagccgggtcattgattgcaattgccggtagcgggatgcggttgttgcggtaacgtccggttagttcttctgcaaagtgggtggcgtcacataaagaacctccattaccacagctgataatcttatttccggcttttaatgcttcggcgcaggtagaggctgcctgtgaaataatcccgactgttgttgtttcctcaagaaagctctccaacgtttgccgagcctcttccagtgttgtttcaataagctctttcataatagttaatcggttaagttagcggctacagaaagagctgcataatctcctatctgctctcccaaggcggctggtttcactttacatactctgtttgcacaggataatgcttcctgatcgattatcttttgcatgatgggttccatcatatttttattccgggtatagatgccacctatcacaatgacttccggattcaagatatcgatcaccatggataatccttttcccagataaatagcagacgtctcatatatgctttgggctaatttatcacctttggcagcttcttcagccacttttcgggcagtaagctgatctagttcctgtaaggtacaccattcaactttctgtccggtctgcaatttctccatcacatacattttggagagttgagcaatacctccaccgctggcaaatccctcaaaagagccctttttaccgtaacctatcggaccgaaatccgacaggcggatatgtcccagttctccggcattgtcattggtgcccgtatacagtttgccatttaatattaatcctgctcccagtcccgtaccgaatgtgagaaagaccatattcttagttccttttcctgctccgaacttccattcggctaaagcacaggcattggcatcattgtgtagactggttttaatgcccgtctttttttccaccattgccacaatggggatgttgtcccatcccggtaggttagggggtgacatgacaatacctgtttcactgttgaggggacctccgcaacagattccaatcgcttttgtgttagtgggggttagttgatggagttgcatcatcttttcggtctcacagaggatttttgctattgtttcgtcgactgttgtcgtgtcaaacttctttttgtcgatgatatgtagctcgtcgttctctttgataccgtagatgatggcacatttggtgcctcctacgtcaattcctaacatgttctctttcataagtattattttttagcgtataatcctgttttttgtaacaatcgcttgtattctttcaggctgaaaggagctttaccatagaggtagtggttcatgaatttctgattaccgatttggtattgaatcagatagattccctgaccgctttcttccggtagtgaggcaattttgaccttttcattagctgggatacggaaggtgccttcgtagattttgcgaccggaggaggcgtcggttactgttacatttccactttgtgtactgcgtgtatcattggttcctatcagtgggtaatttccgtcttctgcatcattaatcagtacacaaacgtcttgctgaacattcttgatgaaataatatgccatcttctttgaattgtaatagtcaacaattgcatcagagatcactggccatccatcccgcaggttccaccagataataccagtcttgtcgtcaaacttctttccacgccacatttctatgaaatatttcatagcttctgcctgtacggattgagaagcgaatataaaatcatccagtttggagggaacttcaccaaaaagtaaacgtacctgattaatcataagattattgcgatcgaatgtctttccccattctgggaatctacgaacagatttggtaacccattcatcattccattcatgattttttgtccagggatatacggcatctttcgtcatcattttctggagactttctaaattagggcagccgtgatagccgatttcactgacaaagcagcaagtagcatccgtatagaatttgtctttgtaatatcctctgggaccccataaatggttttctggtaaatattggtcagcacttcctctttcatataccgcttggctgtagtaaggagagctgggaagataagggcgggtagggtcaaactcataaataactgccggaaggaccttgcggctaactacatcctgatttggattaatattaaatggttgcaaagaccagcgcagtgcacaatcgtcttcattatttcctgaccataaaacgagtgatggatgattacgtaatttgcatacaacagaaatggcctcttcttccaatgcttgtgtaaatgagctacgttgaggatagaaagtgcatcccattgtaaaatcctgccataccataatgccgttttcatcgcataaatcaaagaaatgatgatcttcatacacgttgccaccccaacaacgtatcatattgcagtttaattctacagccatgcggatagattcgtctacgaaagaatgatcccggctatggagtgcatccatgggtacccaattggttccgtgaataaaaataggttctccattgactatgaaacagaatttacccggatgatccggtgggaggttgatgtctgtaatgtctagttgaatcgtgcggaggcctacccgtttattatctgttgataaaatagtgccgtcagaatctactaactctacttttgcatcatataaagccggttctccatatcctcttggccaccataaatcagcattcttgatttccattatatatcggaatgctggggaaacgacaacagagcttcctttatatatttctttcccatggcgacttaatgtatatacggctttcactttgtcgaacttttcgaaaggtagttttacttgtacatcagtatacaaacgtacatttctggtagcagtgtctacattggcgaccatatagtgaacatctgtgagacgtgccggattcaatacgcgtaattctacatctctccacaaacctgcactgactaatcgtggcagaatgtcccatccataggtgtgcggagcttttctgatgaatacggattcttcagacgggaagtttccaatactgaatgtccctaacagatgtttttgtccttcaataacagatgaacggagtatcacttggagttgattgctttctcctgcttttatttctttagttacatcaaaagcatgttcaatcatcatattttctgctttgccaatgtgctttccattcagccatatatcggccagacagtctattccggcaaagaagagttgatattgttgtcctggttttagttgtggcgctacgaatgatttggaataacaccattgatagccttcccatttgcgtaattcatttacattactgccaatcatcggatctttaattaagttggcagccattaggtctagttctacattaccggggacttgggctgatagatgtttcacttcagctagttgcatgtccttgggcgaagttataggttcttcaggttgcatccaataagagagttcccatgttccatttaaggagatggaactaccggaatcggcaaaaacaccacttgtacaagtgagaaatatcaaaaatagcagtgtactgattttattcattgttaatagatttgattgatggtgtgacaaagtaactagtgttatatttttatagtattacataacggtctcatttttgcttctttatatctctattaaacctcctttcttttgtttcaattaaaatgtgagttgatgttttcctgaacttaaatctatctttttaccattatattctactgttgcattcgtattgactgggatcgtgactttgagaatcacttgttctcctttacgttcccattcagaacgaatgattccgtttacagatttatattctgcttttacccagtcaagaccttttacgaaatgaggttggataagaatatgtttgaatccgggtttctgttcatcataattaatgcctgccaatatattgtacatccatgcattaatgtctccaagaaacatgtgatttacggaggcatctctaaattcaggtgaaagtatccatgtttctgctagtgtagtgaaaccttgttttatccaattgccccaagatggagcttcttcttgtgcggccatctgatatgccaagtcagcatatccatatttggaaagcatccgcaggactgttttactgcctaaaactccaaaatcgagcaggtttttattggcttttatcatcgtagaaagattatctgcaacctgctgttcgtattctttaggaacgattccaaggtataaggcaactccttgtgctgcttgcgaaccattggcataaatagctttggatgtgtcgaagtatttgtgattgataagcaatttcaattcttctgctttcttagcataactactaccatcttttccaatgagttctgcaaatttagccatatacagattgtctaaataataatagcaggtagtggtgaattctgtaggggtttgtgttttatggaatacccagtcaccaattccgtaagttacggttccttccgcgtcctcgcgtcctgcgaggtaggcaaggtatttggtgcatacaggccatagtttttcgatgcttcttgtatctccatagtagtggtaaattgccattggcacgataaacatggcagcatcccatacaggacctatccagtcatcatagccccatccggaactaggaatgattcccgatatacgtccttcttcattttgattatcaatcatatcatccagccatttttcatagaaagtaataccatcgaagtttaataatcctaaatccattgttatgtgtgcatcagcagtccatccatttttctctcgttggggacagtcagtcgggatactcatcagatttgataaatatgattgattagcagctttccatattttatttaatagttcatttgaacaactgaatttaccaacaggaggaacagccgtatgtatgaattgagcggttaagctctctttagtaagttttacaggacgatctgaacgaacttctacatattgaaatccatgatatgtaaaatctggagtgaatgtaccttgttttccgtccaatatataagtgtctgtttgaaaagcgaggccaggtaatggtttgtagtaaatatctaagttgcgcatttccaagcgtccgttatcttttagcaattcgccgtgttgcatactgactttagtgcctttcttgccattgatagaaagagtacagacccctgacatattaactccaaaatcgtatacataggctgtatcaccaaaagaacgcatattgattggagtgataaattgttccgtttcaatagcaggcatgctttgtgatattagtaggggagaaggggcagccacctgaattgcatttgtccatctagagtcatcaaaacccggtttgtcccatccagcaattgcaagacatgcatcataggtatcaccactataaatattgttttgtatataaggaccggtactcgttttccaagtagaatctgaatggatggtttgcttttctccatttttatataatatctccatttcgcagatcattcttgggcggttacgccagcgggcttgctcatagctccatgttgctacaggggccgattcgttgtagaatccgttcccaagtattgcagatagtacgttctctcctttgagcagttgtgaagtgacgtcgtatgtgttatacagatttcttttatcataatgagtaaaacccggattgagatgtgatgatgttattgatttaccatttaatgtcattttataatatgcagcggcacttacatataatcttgcttgttgtatatcatcttgagcgataaacgacttgcgcaacatgggcgctggcgtataatctttatcatgattatcagtaatccatactcctgtccagtcactttggttgagttgagctgtttcaaaactggatataggagagataatcttatgttcctttgttttatcccatgctattacttgccagtaataacgagttctggatttcaatttttctgatccttgataggtcgcatgaggagtgtcagagtaaatagtgtcagaatgccagctattatcggatgagtttctcaaatcttgttcccgggtggcgatatatagctgatagctgtcttgagaaaactctgttgcatcttcattattggttgtgtaattccaagtaaaacgcggtgctggtgaatcaatgccaattggagaaatttgatattcacatcgcatattttcaatatcaatgttgttactgctgcatgcccatactagaagtcctaatagagccagcatgtatttttcatttttaatttggaacttcaattcatgtatttacaaccgattattactcaatattttatagataataagtcagaaatatggttgttatttttaattgcacattctaaaaggtgaagatttaacgcttttattgattattaactcaaaaaggacatcaacttgggtcgtttcttctcttttccttgctattcgtttccgatattccacttttgttttggtctatctcatatgtactgcaaaggtattgatttttgtttgatattgctccttgcttgctccttgtcgtagattaattttcacacaggaatttttgttctctttctataggggcttgaaacaatccatttattggaaacaattaaagacggagctggtttgccccagtgctttttaagaaacagggcaattattttatctccacaaaggctcttgttcccaattatgaggaaagcctaataaacgagttcttactgatgggtatttcgataaaagctgcttgaaatctgcaacaaaagtgttgcccatagaaatggagttaagccaatacaccacatagcagagttgcggataaagtgtttgttcacggaacgagaaatccgtaatccatgtgtttggcatacgcataggcatcattggcttgacaggaaagacccgatttgacagtcttgaatgatgggcgcagcaattacgaagtacgggtctgggtacggattaaaaggctaagtgattatttccagtcatttagcctttttaattatctaatttttccccacattttccccacagctgtctatttatatatttttatatattttagaaacatatttttccgtaaagttatgtacctttgtcggcaaataaagatattctcgtcaaacaaatataaataatataaacatggaaaaaaacagaaaaaaacaaatcgtagttttgagtatagctttagtttgcattttcatcttggtattttcattgttccataaatcagcgacaaaagatagcgcaaatcctcctttaacaaatgttttgactgatagcatttctcaaattgtctcagcttgtcctggcgaaattggtgtggcggttattgttaataacagagatacggttaaggtcaataataagagtgtttatcctatgatgagtgtgtttaaggttcatcaggcattagctctttgtaatgactttgacaataaaggaatttcacttgataccttagtaaatataaatagggataaacttgacccaaagacttggagtcctatgctgaaagattattcagggccagtcatatcattgacagtgagagatttgctgcgttatactcttactcagagtgacaacaatgcaagcaaccttatgtttaaggatatggttaatgtcgctcaaacagatagttttatagccacactcattcctcgttcaagttttcagatagcttatacggaagaggaaatgtcggctgaccataacaaggcttactctaactatacatctcctcttggtgctgcaatgttgatgaatcgtttgtttactgaaggtcttatcgatgatgagaaacaaagtttcattaagaatacgttaaaagaatgcaaaacaggtgtagataggatagcagctccacttcttgataaagaaggggttgttatagcgcataagacaggttcaggtaatgttaatgaaaatggtgttcttgcagctcacaatgatgttgcctatatatgtctgcctaataatatcagttataccttagcggtatttgttaaggatttcaagggaaatgaatcacaagcgtcacaatatgttgcgcatatatcagctgtagtatattctttattaatgcaaacttcagtaaaatcttaaactgcacttgctttgataattaatgataaacaatctaaaagcactctaatcgttatcggagtgcttttagattactaatcaaattgcttctattataatttgaatcctctactttttctttcttcctgttgcggcactcttgctccatatctaagcctgtgccattgctccctgaaccagtcggcaatcggcttcctgtttattgtcaggttcagcctgctttcatcgtcagggtcattttccacccttaaaatatcatcctttatatcaaagttccgcctgtgttgctcggaatagattttaccgctacatttcagggcttcttttttgactataagactttcagtcatttctttagagaatcccagcatggcacaaaacttttccatgcgcagcatttccctgaacatcggaaaccacctgaaagccttgtctatgattctggcgagccgtgacagttctttttctttcatgtcaagttcctgcctgtgcatttctctgagattgtggatttgcgtatcatgctgtttctgcatctgctgtacttggctctgcaatttttcaatattggtgttccgttttgaaacctcgtcttgcagtttttcgttggcacgttccagttctttcagttttccactcccgaaaagagaagcaactccactagttatggctgtcgctgccgtggtggctgtcttctttaacttgtcagtgcgtatttctgatttcacctgtttcagttcctgctcggcaagatttatctgttcttctttgtgccgtttggctgcatccatgcgttgcagttcagctttctgcttctcaatgataaagtcgttccgttccagatgctccttaccagtgacagcctttgactgcccgcgttccatcagcaggatgtcggatgcaagggtctgcatctgcatcatgtcatcgtcattgagctttcggctctttcctgtttcgtggttcatccagtcgaaaacgatatgggcatgatagttcggcttgaaccatctgtccccgactttgaagctttccctgtcttccgcttccggctgaccgttcagccaatgcccttcatccttgtgcaggaagatttgcagcggtgtgattccccagcgtctttgacactcctcaccgaatttacgcacgtctgccagtgtggtgtccgacctgacaagcagcactccttcacgtatgggggagcatcccgcaatcttgactattttaccgttcttgcctttgcgttcacgctccttttcctgcatggcacgtccggtcttttcctttaccatctgtctgatattgtcataatgcatccgcaaatccggactgccgaagtcgggatttatccactgttcgttatcggtggatagttcaggaacgacatagattctggactctccgatgtggcgcatgtattcggcagtcctcctgttgtgagcctcgctcgatgcgatgttgcagggcttgatatgtatgcttgattttgttgccatagatacttgttttttggtttgtactttattgtttgcttttccgctgtccgtaaacgcatggggttcttaggggtgcaacccataagcggagattgcaaagagagggtcactctttgctctgggttctcaggggagaaacgccctgagtgggtcattagggtaaaaccctaatcccctcgggagagcccacaactacgtaagcggagcgtgtagttatagtgggctatatcaatggcaagccattgtctgcaaactccagcctacggcttccgctctcctccgtcagggaggtttttcatcatcgttgccgattggagatgcaccgaccagcacaaggtctaaatcgtctatcagtttttgcaggacgggattcttctctatcatccgctggaggattctctcagcctcgaccaagtggttggctgtactcatcaccttgccctcccgtatctgaaagataatccaatcggctatgtcgatatgggcttctttttgtttcggggtggcattcctttcgatgatgtccgaaaccaccaccttacaaaagtacatgctctcggctcgctgtttccactcggcataagcatcggcatcgggaaagagaagcacggttcgccctgacagtacacggagtttctcttctctcatctgactcttaccacccgtagccagccatacataatcggggaagatagcagaaccgataacggcactcttctcggattccaccaagaccaccaccttgtcgggatgcgttttcaacaagtgttccccgaaaaggcattgggatagttgccaatcctctgccaacacacgctgctttttcaatatgctgtgtatccagttcactgccgatgtctgtcctcccttgatacggtgtccgtcttcgggattgtactgcatcacctttcccgtgcgtaccttgcccgtcctgtctatctgccaaaagataacagagccgtcacgggtagcccccaaacggtattcctccaacaaccgcttcaacacctctttcgccttgtcgccatagtaggaagtaaggagtgtgaagaggaaacggaagaaattgctacgctcgctttgcgacttctccacatagtgagggggaatatagccgatggctgtcggcttactttgctgcttcactttcttctgctctgctctttgcctgtcaaaagagaaatcattggtagttctgtgttcaggatgctcttgaaaatactctttcggagtgtagtgatacccacaaccgctttcgtggttacatctgccgaccgatggatgcaacggcacattattttcgtccacgtaatagacgaaagaatgcctgtctccgcatttggggcaggtatgccgtgttgccgttcctttatacttctgtaatgaataattgcccatagcttagtccgtttttgatggttgattgtcggctgtcccatcctgtcccattgtcccacactctaagggttgggacagtgggacacttgggacacctgcgtttttactctctttgctgcgctggatgatacggtttacggtggacttgccacaattcacctgtgaggctatctccctgacggacttgcccgattgggagagttgcagaatttggcaatccctttggcttgattcattgtcgcccaattttttcaagtgttccttttccgtggaatagcccctgaacacgaactgcaagaaagcatccaccttgtcaatctcgtaaacgattacattatccgcatcatgagagaacgtgccatagcgcactttaagctgcttcacatagcgaagccctccgtcttgggcactttttccaatggtgaacacgctgtcaaagaaattgtagagccgtttgcttccggcaaggtcgttggatgtgatgggacaatccaaagagcgtttgggcgtatgtgctaggacaaggatagagagcgcatatctctttttgagattgttcagctgaatcatcagccgtcctgcggcatcgcctttctccatggcgcaacacaggtaggtaagattgtcaatgatgaaaatcttgcagtcggtctgcacagccatctgttcaatgccgcctatgatagcttcctcaaagttggcatccaaaagctggttgcagtcaatagacacccgatagagtttgtcgggaaaggtgtagagctctccatgctcgttggtatagcggagctggaactgcttttcggacagttcaaagtccagatacagcacattgtcggttcgggcgatgcggtcggctatctgcacggcaaggatggacttgcccacgttggaatcggcaaacaagcaggagagttccccctcgtaccaaaagctgtcccacagcgcacggggcgtaggcaataacgatgcttcaagaatggtttggtttgccgtcttgatattcatcatgcctacactgtcgggcataccgttatgcgcttgggatgcttttgtgaggtcgccacgtatcaggttgatatagttcttatcctcttccatatcattcaccagttacgtgggttgggcttgcgacggtgggaagaggataaggacttgttcagttcctcgtctgacaacggtatgggattctttcgggcggtttccagccacttgtccagttcgtcacggtaaaggcaatagcgtttgccgggcttggtggcagggattgtcccttctgacagtttcatgtagagcgtacccttagggatacctaaatactctgctgcctcgtccacagacatgggcacgtgggtgtccaccgttttggcattgttcacactgcgctgctcggcgagcaggcttttcaggctcatcacttcgtctcgaagctgagcgacaacctcggggaggtcgttgaaggtaagaattgatttttccattcgcgtactcgtctcttttgtaagacttggcgcaaaggactgaaatgatatatccgtgaatatctccacgacacgtcattgcaaaataattcccgaataattaagcccagccataaatgacgggtaaaattactcgggaaacgatgtaaaacaggcggttatgagttaccggatggttgtcgttggtgtcgtgattatcctaattccgcacataatcctcgggatagtggaaatcaagtttgccgttttcgggttcatcaatgggaatttccgtctttaacggctctaccttgaaattcttgatggttgataagtctgtatcagcaaacgatttcgggaaaagggctttgatgaacttggcacggttatccccattgtagtatctcttgtacaggaaacgctcagagatattccatacgaagtgacggagtggaatgttgttgatgtctttggtaaacggtctttgtatgggcttcggggtataagtgttaagattcatccatttgtccacctcagtacagatgtggttcacggtttcttggtcggcaatgcgaggcaggtaataatggcaatactccatgaccatgcggatgcgctcttccttttcccgttgctctctgcttgcgtaattggcacggttcttttcgtgaagatccggggcgatagtaagctctatcggttgtgtttggataagtgtctcttcttttgtcggggatgattcgggtacaggctcagggactgatgtaggtccaggcacagatgtggcttcttcaagtgtattttgtgacagttcttcctgcacctctatggcttcggcaatcgtttctttcttgccgaacttgattttgtagatttcgtatgtatcaaagataagtgtctgaaaggagagatagagcaaccatcccaacaggttacagcatacgaatactatccacctgacaaagttgtcttggttgaagctgtccgctattaccagcgtggcaatggaagatattaggacgatggcgaagccgacaaagcccaagatgatgtatttgtccttgattgatgattccatatttcgttgagagattgaatgttcctgtattattttgtgcaaagttaatgctatttttcccaattactgcccgttatttgcggttagaacggtctttttcaatgtatttcacgaaatgtcatcatatcatactctgtttcatactctgaggggcttataaatggtggcatcaagccaaaaacatagaggggcgattatagccttgtagccataaccgcccctctgaatacctgtcaatgtgagacatttatgcctccttgcgtttcaaggttatcttgtccaccacctgacacatctgctgcgctgctatcttggaatagatttgtgtggtggtaatgttcttatgtccgagataggcttggatgacagccatgtccgttcccatttccacgtgcaggcttccgaagctgtggcgggtacagtgaaaggtgattttcttggttatccctgctgccgtgagccaccgttggagtggtccttgcagcatcttgtccttgaaatcctcaaagataagtccctcgccccgttctcccagcagtccataggcttcatcactgatggggttatgcactatttctttggttttctgcatacgggtggtaacgaacatcctgccgttggtgtatggttgtatctgctgccacgtgagctgtctgatgtcgctctttctcagtcccgtaagacaggcgaaaagaaaagcttttttcaagacctcctcctcacagggtgtttcggcaagccgtatcagttcctcttggctcaaatgctccctgatggtgggaatgcactcgatgcggtctaagaagccgtttgggttctcctttatcttcctgtcacggtaagcggtgtgcagcacggcacggaaagttgaccaatagcctgctgcggagttgatgtgcagcttttggttggtgtggatggattggggtgcatcaagcaggtattccatgaacttgcggcacaaatccacatccacctcctcaaaggtgcatttgccgttcacgaaccgctggaaatgcttgtatacgtgctgccacttgatattcttgcggtcagccagtcctttgaaataggcaaggaaatcgcccttcatcttggtcttgtcaaaaaagccgttgttttcattgaaaatggcttcgtagcgctggttgcgcaggatgaccgctttcttcatcatgcgtgcgttgaagtcccgttcctgctggtttgcaggtttggcgaagatgtaaattcctaaggcttcacgtgtaatcactctcatggtgacattgtcacggtagccgggatagtagtcaaggcatagtgaatactgtgtcccgttcttaatcttgcgcttacgcaaggtaactgttttgcatttactcataataattatgttttaattggttgtatacattttggagttgtatccatgtttccgatggcaaaggaacaacgtgaaatatccgtgaatacctccacgatacatcattttgaaataattttcgataatcccgatttttcacggttatttgttcctttcagccatgacacgctccacatctgagcgcaaaagcaggtttttcacacccacctttatcttttcgatgtgcttcaccttgacgatatggcagatgttggctgacgaaagaccatagatttgctgcacctgctcaacggtatagtagcgttcatcgttcacaaggtcagttctgcggagttcgttcaaatgtgatttggagtaataggtacgcccgtactctcttttagtgggtatcttatggcgataggtgtaggcacggagtgcggtcggcttcatgccgaacagttcctccacctcctcggtcagtagccagtcggtaatttcgctaatatcaactgccacaccgaaaaactcgtcaatatgcttcttgctgtaatagttctttcctgcgatacggcagatggggatatggttacgcttggcggaagtgtaaagccatgactgctttaccttaaaaagggacatcacctcctcgcccgaatagaagtccaacacttcttcgctttccttttcccttttttctcttttggcaggtaaggaagatgaagatgatttccttggtgtggaggtgttgccgggcaggatgcggtgatagggattgccctccaacatctgctcgatgtcggctctgcggatgaatgccatgcggttgctgatgcgtgaggctttcagcttgccgatggctacaagtttgtaaatgtactgtcgggaacagcccatgaggatggctgctttggaaaaggtgagatactcctgatgctgtatctccatcaagggttgggcgactttgaagaggttgttcttctgcatcactctggctcgtttggcttctgcctgacaagcctcactgcaatatctttgcataccgcttcgggttacaaaggacttgccgcaaaaactgcattttctggttgctttcataccgttttatcgtttaatggttcatttcttcaatcctatatctctgaaatggtaaacggatgtgaacggaagtcaaccattgtcgcttttctacacagtgtgactgtttccgcatatcggggcggttattgtcgcttgtcgtaaacggttgtaaacccttgtcaactgtctgcacggtgtgacaaaaaacaagccccgcaaattctccacgtcagaaatacgtctcaaaaatatgtggaaatttgggaagcgacaaatggcaaccgaaaagtgttaaattttagaatatgctggtaattaaagatttacactcggatatttctgattagttttggttgttctatggttataaatacataattctgtatctttatgttaataattagagggctattttctttattgttacatttgttaatttgatatcattatttattttcactaaaccggttaagtgattgaagaaaaaatgtaaaatcatgactagggtaatgaacatggcaggacaagtgtttctacttctcttttttcggtcgaattttccaagcgatatttgatatcgccaagtagaatccttacggcattcttaccgatctcttctattggcattcttgcgatgttcatattaggtgctaagacacggaatgctgatactccatgaatacaagccaattcatatcctttatttatattgattcctttttcataaaagtaacggaatgcttccagagccaaaatatgggttgtgaagaagaacccatctacatcaggtactttgctgaatatttgatcaagagtcttgaaaacattcttctcataatcaacaaaggtcacctctccatatagatcaggatcaacgggtaggttggcttcaattaaagctcttgcatacccttctcgtctcatattcattgtgcggagatgaggattcgtggtaataatagctattttagatgaaccgttatcgatcattttctttactaactcgtagctactgccttcattgtcaataatgatgtagtttgtctgcatctcaggaaagtagcggtcaaataagactaatggatagccttctttgactagattctgtatttcaattttagaaacttttgtgggggctactataattccatccacctgtttcgctttgaataaccggatcattctgttttctctttctatttcagattcagagctacaaatcattaatgaatagccttgtgtttccgcttccttttctatagaacgggcaactttggagtaaaaagagtctgtaatatccggtatgattaatccgattgtgcctgatatacccgtatttaggcttctggctaataaattaggctggtaattcaactgtttggcgcattgaaagactttttcttgtgtagcaagactaatacctttttcatcccccttaccagaaagtacccaagagattgttgtcttggataattttaaggtttctgctatgtctttaagggatgttttcataaacagtatctatttaatcggttaagtgatggcaaatatatgaaaaaatatctcattatataatagttgagcaatatttaactaaatattattttttgatataataatttgcaatttaaaaataacatagaaataaggtgtaaaccaaagaaagtaactatatttgtatcattcaaacgaaagatatatgaaagtaaagaaaattagtgcggctaacgtggaggcttgttcgcttcctaaactattcgatgaagaaaaaatagattttcagtcgattcagtgtgtcaattgggctgaatatccttacaaacctaaagtgaattttcgaattgctcacacacagaactcgattttgctacattttaaagtgaaagaggagagtgtacgtgccaagtatggagaagataacggttctgtatggactgactcctgcgtggaattcttttccatacctgcaggcgacgggatctattataatatagaatgcaatagcatcggaactattctggtgggtgccggacctgtgcgtaacaaccgcgaacatgcaccgaaagaggtgactgctcttgtacaacgctggtctagtctgggtaatcagccttttgctgaacgcatcggtgaaacggactgggaagtggcccttattattccgtattctgtgttctttaagcaccagattgattcgctcgacggaaaggagataaaagctaatttctataaatgtggcgatgaattgcagacccctcatttcctttcatggaatccgatacagattgaacagccggatttccaccgccctgatttcttcggaacgttggagtttgaatagtgaattgaatctttgaatttgaagataaaaaagaaggttgatacttgaaaaagtatcaaccttctttatatgaagtcactttgtttatttcacgatacctctttccgagttcttcacgaagtttacgatattctcgatctcctcactcattggcacttgatcgataattttctgcactgcatcctgcacactgaagttaccttggtaaatcaagcgatatgcattggcaatgtgccggaggactctttccgatgtattgtggtgttgtgacagaaccacggcatttactccgtgatatgccactggatttcccgacatgataacatatggaggtacatccttggatatgcggcaaccactctgtacgagcgtccagctaccgatatgacaatattgatgtaacgtgacattaccacttaggataacgcaatcgtccaatgtacactctccggcaatggtgctaccaataccaactacacagttgttgttgatctgtacgtcatggcaaagatgtactttgtccatcagataattgccatttcctattttagtagcattgccggcaaatgtagcacggctgatgactacgttctcgcgaatatcattgttgtcaccgataatcaggctgctctcttctcccgtaaagtggaaatcttgcggttccgctccgagaacggcattctgatgtaccttgttcccttttcccattttagtacctttcaggatactagcgtaagacatgatgatgcaatcatctccgatctctacattcttttcaatgtaggcaaaaggcagaactgttacattcttgcctaattttgcttcggggtctacgtaagctaacggactaatcataatagtattatatatttaaagttattcttatcttccaccacccagtgcctgatagaggcttactacagcttgcatctgatcaaagcagtcggacacctgagagagctgtgcactcaaataggattgttgtgcagacagtacttccagataggttgaggttcctaagttaaacaattcttttgtatcttccgaagctttctgggcagattctacctgcatttttctggattctaccttttcgctggtcttttggtatagacttaacgcattgctaacctcactaccggcattcaataaggcctgttggaaagataatttagcctgttcctcctgcgctttggcagctttcaagcgagcgatgttctgtccccgatagaacaaaggctgtgtcagtgaaccaacaacggaagccaataatttaccgggattaacgatccctgctcctgaattgtttgtccatcctgccgaaccgctgagtgtgatttgcggataaaaagcggcacgtgcggagttggtgtcatagtagcaacttgccagtgacatttcggctgcttttacatccggacggttggataacaattgaataggtatgcctgcagaaagctcggtcggaagtacttgtgcttccaatacgccacgcttgatggcatgaggagcttctcctaaaaaagtagacagggcgttctccgtttcacggatactttgttcgatatcaggaatggtagcaagtacctgtgcataagctgctttactttgttcaacaccggctgaattgatgttgtacattgctgcatctttcatcgcttccattgtttcggcattgcgcttcagaatttcggccgtctctttagttatttccagttggcggtcaagcattaacaacgtgtagtacatattggctacatttgagattacttgagtttgtacagcctgacggtatgccttaacctgtttcaaagtaacttgtgcattccgttttgagttcagtaactgaccgaacaaatcgacttgccaactggctgtaaccggtaatgaataagtttttgtagctgcattcttgtcaaagctgctgattgttccttgcggagacaatcccaaagatggggcataagccagacgtgcagacatcagggaggcttgtgcggctttcacattctgcgcagcagacaagaggtcagtattttggttcagtcccgcttcgatgagagactgtagttgcgggtcggtgaagacttctctccacggcagattaccgaagttggtcgtatccgaaaccagtgtatcgttatccgctaccggatcgcgatacaggccggaagttgtgatatcttcgggtctgtcatacgacttatagatgtggcagctgctcaggagagcagttgcacacaacatatatagaatctgtttcttcatatcgaatttcattatttagcgtattgttcaatctctgttacagcatctgtattgtcaatatcttcccattccatcggtttaactttctcttgcagatactggaagataacgaataaaacaggaacgataaagatctggcagatcataccgattaacatacctccgatagaagcagtacccagtgtacggttaccgtgagcacctacaccgaaagcaaacatcaacggaagcaaaccgactaccatagccaaggatgtcatcaagatcgggcggagacgggcaccggcacccaatacggctgcccaagtgatactcatacccattttacgacggtcgagggcaaactctacaatcaagatggcattctttgccaacagacccatcaacatgatcaatgcaatctgcatatagatattgttggacatcgtaccaagaatcatcttcaacgctgagatattaccgagtgcacttacaccgttgacaaacaggaagctacctaacagaccgaacggaacggatagcaatacggctaatggaagtatgtaactttcgtactgcgcactcaataataagtaaacgaatacgaaacagagcacaaatatcagcccggtagcacttccgctactctgagcctcttcacgtgccatacctcctaattcataggtataaccggtaggcaggttttcttgagcaacctctgcaagagcagccagtgcctgaccggaggtataaccactggcaggagctaccatcaccttcatggaagtataaaggttgaaacggctgataatatccggaccatatactttctctacagagatgaactgggcgatcggagccatttcacctgcactgttgcgtaccttgatattcttcagagattccagattcttacgtgacaatggatcagactgaatcataacacgatacatcttaccaaaacggttgaagttagatgcatacagacctccataatatccttgcatcgttgtaaggatatcgcttggactgataccagctttcttacaagccgccgcatcgatgtcgatcatatattgcgggaagttcgggttgaaagatgtttttgccgagttgatttccggacgtgcttccaaggctgccgtataatcatttactacatcaaagaacttgttcaaatcaccaccggtcttatcctgcatattcacctcgatatctgtagatgccgaatatcccgggatcataggaggagcgaagaacaatacctgtgcttctttgataatcttctgtgcgcgcatatataaggagccgactacaacgtccgagttctgtatcatagaacgttcatcccagtcctttagtttgataatgaaagaaccgtaagaaggtccctgaccaccgatgaagctaaatccggaaatcatggttcgtgataatacagcagggtcagaagcgatcagactgtctacgcgtgctaagattttctcagaacggtcttgtgatgtacccggcggcaatgttactgctcccatcaaggttccggtatcttcgttcggtaccatacctgtcggagtggtgttcatgaagaatataagcagtacgatagaggcggtaactaatcccatagacagccatttcttctgaataaagaacaatacacgttttttgtaacgtttcaggatagactcgtatgtatcgttgaatctgttcttgaacttctttgtactcattccgatcagtgccaggatactaagaagtacaaagattgcggtaaccaccggattgagactgaagaaaccgaaaatcataccgagaatagcaataatcgtgaaggtaagtgtgattcccggatgtagcatttttccgatagcttcggtgtatctgttgatcatggttgtatgagccgccgtataagctactttcatacgttccttcaatgtcgaatcttccgttccatcttccttcttatgcggttttagaagaatagcacacaaagccggactcaatgtcaaagcgttcaatgcagacaaaccgatagcgatagccatagtcataccgaactggcgatagaatgttcctgccgtacctcccatgaaacttaccgggacgaacacggccatcatgactaacgtaatagatacgatagcaccacccagttcattcatagcgtcgatagaagccagacgggcagaagtataaccctggtcgagcttggcatgcacaccctcgacgaccacaatggcatcgtcgaccacaatcgcaatggctaggacgagcgcacataatgtcagcaagttcaaactgaatcctaccaaagacagaatgaagaaagtaccgataagagctaccggaatggcaatggttggaatcagcgtagaacgtaaatcctgcaagaagatatataccacaataaacaccaggataaatgcctcgatcaatgtcttcaacacctcgtgaatagaagcgaacaagaagtcattggcattcatggaaatgttaagcttcaatccggtaggcaaggtttttgatgcttcatccagcagttgctcaatatcactgatggtctgtgttgcattggttcctgccatctggtatacgatacaggttactgacttgtggccgtctacacggtttgtaaagttataacccaaacgatccaattgaatttctgctatatctttcaagcggagtacctcaccgtcaggcagagatttgataacgatgttttcaaattcttccggttgttgcagacgtcctttgtagcggatggtatattggaatgtctgattactgcgttcaccgaactgtcctggagcagcttcgacattctgttctgccaaggctgcagatacatcaccgggaacaagtttgtactgtgccataacatccggtctcaaccagatacgcatagaatagtcctgacccaaaacgttggcgtcacccacacccggtacacgttgtacttgaggaatcaagttgatcttagcatagttttcaataaacgattcgctatatgtatctgtctcgtcatagagagagaatactaccagcatggaagtctggcgtttttgagtggttacaccgactttggttacttcggccggcaacagaccttgtgccatagaaacacggttttgtacattgacggcggccatgtccgggtctgttccttgtttgaaatatatggatatctcaccggaacccgtattggatgcagttgatgtcatatacatcatgttttctacaccattgatctgttcctccaacggagcgatgacggagttcaatacggttgatgcgctggcacccgtataagtggcccttaccgacacggtagggggagcaatgtccggatactgggtgataggcaatgttgccaatccgatagcacccagaatgactatcaaaatagaaataactgttgatagtaccggacggttaataaaattatctaacttcatacgattatctaagttattaattgaaagcagtagctaaattaccatcgtgctggtctttcaaatgctgttgatagtttgcttctttttgagcaggtgtgattggttgtatggtttcaccatctttcagattctgcacgccttcgatgacgattttatctccggagttcaaaccggaagtaacgagatattcttttccgttgtccagattgaagatggtgatttctgtatatttcaccgtgttatccggctgcaggacataaacgaatttcttatcctggatttctactgttgctgattgcggtatagtaattacattctccattgtgtaaggaatcagtacgtttgctgttccaccactacgtaggatgtgttctttgttcgggaagagggcacgcatacttacagaaccggttgattggtcgattactcctgtgattgcgtccactttaccttcgatgctgtactctgtaccatcaatcaactgaagcctgatagatagacggtattttttcgatttcttctttgatggtaccgcctgttttagtcatcgccaacaattctttttctgtcatggagaaatatacatatacttcttctatctcagaaactgtagtcatcggagtagcgatagaagggctcaccagtgctcctaaacgataggggatatcattgattacaccatcggaaggactcttcacttgtgtgaaagagaggttttgtctggctgtgataagctgtgctttcgcttgtgccaattgtgcctgagactgtgccaatgtgttttctgccattgacagatcgtagtcactgataatttgttttttgttcagttcacgtttgttatccactgttatctgttgggtacgcactgccgcttctgctgttgcgactgctgcttcagccgtacgtactgctgcttcatattgtgtcggatcaacgatgaatagaacttgacctttgcgtacagttgctccttcgtctacacatagtttcgtgatgaagcctgatacctgtggacggatttctacgtcttgtttacctttgattgtcgccggataggcagtcgttaaattagcagtggtcttttgtaactcttgtactgcatattctgggacttgtcccgttccgttgcccttattgccacaactagacaaaagggctacgcaaaatgcaaataaaacaattctacttttcatacttaataattatctgtttttaatgtaatgcgtttgttaccggtgtgtcatcattcatgtcgataagtgatttaaaggccaaaaaagccggaaactaattattaataatcagtttccggctgcaaaagtacagtaatttcgctattcttgttctttgataccgtgttttttaactatgttttttactttagtttatgagatacgggagacattatgaaactgaactcataatcttgatatggaagacgatatttttctaatggtatagctccccaactattgacgcatgccagtcccgtttgtgccttgtcaatacagaagtttgtaaagtttgctttttccacttcgggggaatggcgctggtctttgccttcaccgtcatccaatgattcaatggtatagttcagtgcggaagcagagaacggagcttcggaaacaaactgcaaaccgtttccgctgatattcaagagtctccaccaacggatgtccgtcttcgttccggtttcctgtgggcggatatacggatagaattgttcctctaccgtttgacggtatttgccaagtttggctgcattgttgcggtcggcataattctctatcggtccgcgtccgtaatactctatttcgttaaagttggcaggcatacgcatctgcatgccgaaacggaacatttcagacactttcttgctcttgtctgctaccatcttctgggtaactttcattgctcctttgttgttgacgatataagtcaggaataattttcctcctatcgacttcatgtcatattctgcacgaatcacggcctgatcattctcaatagcatgtttcagggaggtaagcttcaatgtcggattcttccagactgcatatttgcgttgcaagcctgctccgaaatcattatcggtcggtgcacgccagaagttgggagtcaattcgctaccgtcttccatcatttgcattccgttcacatcgtagcggcagagatagccgttgtgtctgttgaaatccatagagaagttttcgcctttgacggtcaggtaattttggtcgttatccagaataccgggtacggtgattgcctgattggaagcctgtcggttttccagcttgagctccggagctttatagtcacgaatgctcagttgctcgtatgcgatggttgttcctgcgggtaacaatgtttcggctgttttcagtttatagttgacattgagcagtaactctttacacggacagatgttttttgtgtcaaacggaatctgcactttgacggtttgctggggtgccactttcagatccggcacaatgcctgtttgcacaacttccccgtctgccagcaattgccattctagataatatgaagacaggtcacggaagaaattctcattgaaaatattgatttcacctttggcgagatcggcaggagttgtccatatatcctgatagaaataagccacttcgtaagcatgtggattcggtatgcgatccgggctgattaaaccgttattgttaaagttattgtccgaagcgtcatatttgttgaagtcacctccataaccgtagatggccactccgtctttatttttccaatggcaagactggtctacgaagtcccagatgaagccgccttgatatttcggatatttgcggatgatgtcccaatattccttgaatcctccttgcgaatttcccatcgcatgtgcgtattcacactggatcagaggtttttggatatctccttcacaatatttgatacagtcctgataaccatagtacatcgggcagaaaatatctgtaaattcactggtacgtgcctgctcatattgtacggcacgggtcttgtcctcatttttaatccatgtataacatttttcgaaattaggtcccataccggcctcattgcctaatgaccagaaaatgatggacggatggttgtagctacgttgtacattgcgttggttgcgttccaaatgtgctttggcatagatcgggttcttggccaatgtcttgtcaccatatcccattccgtgagactctacattcgcttcagctaccacgtagatgccatattggtcgcagaggtcataccaacggttgtcgtccggatagtgacaggtacgtacggcattgatattaagctctttcattactttgatgtcctgcaacatgcgctcgatagaaactacatatccgccgtccggatccatttcgtgacggttggctcccttgaagagtaccggttgtccgttgacgagtatctgtccgcctttcagttcaattttgcggaaacctactttaacggggattacttctattgtattgttaccgtttttcaatgtagcggtcagtgtataaagattaggtgtttcagccgtccatttagcaggattggaaatgttcaaagtggtgtttaacttacctgaaccttttaaatcagcagtagccacactgttgcctagagcatctgccaggtctaaggcaactgtaccgcttcctttcaggtcaacagcgatattcagcgtaccgtctttgtactggctgtccagatcaggagtaacacgaatatcctgaatgtatttcttgtcgcgtgcgtagagatagcagtcgcgtcctacaccggagtagcggaagaagtcctgatcttccaggtaactgccgtcacaccagcggaatacttggaaagcaatcacattcttacccggtttcagatagttggtcagattgaattcagcttccagtttgctgtcctcgctatatcctacgtagcgtccgttcacccaaagatacatattggaagtaaccgaaccgaaatgggcgaaaatctcttttcctttccagttggcaggaacgatgatttctttccggtaagaacctacgtgattgttttctgtcggaacgtacggtgggttgttcttgaactggtttctccatgcatatcctacatttacgtagatagggtcgccgtagccgttcaattcccatacaccgggaacctgaaggttatcccaacccttgtcgttgaaattagtctgataaaagtctgtcggacgtgcttccgcgtgtctcacccagttgaatttccaaagaccgtttaaagtcataaaattcgctgagttttctttgatgccggctttagcttcatcagccgatgcgtaagcaaaataattagtgtgcatggcagagcggtttacggaattcacttccgggtctttccactcgttgaagctttgtgcttgaattgccgtcagtcccaatgccgccagacagcaagatagtagttgtttcttcatggtttttttgtattaggtttgaatttcgggagccaaagataaggattattttattcaatgaagggcaaaaaatcattcaattagggatggtttttaataaattgactgtattataaactttttacctgacgaaacgccatcattcccgggaatcataccgaacatggatacttcttcgtataaaccacctgtttccccgccccgtagcgcatcaacaccccttgttcgataaaagcattcagttcattgagcgcccgctgcttgtcatgtcctgtcaaccgacaataatcggcacgcgtaagacagggatatttcccaagatggtcattgactatagtcagacattcctcttcactgtgtccttttccatgcggacgggtgaaagactccccgcgttccaatctcatttgccagcccacttcctttttgaattgagcgcttgggcggaaattgatattcttcagtttgatagattgtgcacgtacctcttctttcttcatgatgggagggccttgcagagaaacggaaaagtaaccgatatcccccagttccacattccatccgttagcgagtaaatctcttaactcgttttggaaagactgcatggcacctgacaataaactgcggcttattccggtgaatttgtgtacgcgatccagaaattcgttctggtcgacggttccattgataactacacgggggtgaagtggttgttgttcgcctgtctgttgaatatcaggtgtttcgtaaaggtcgtaacgtatgctcatttgcgtaattatattatgtaggcatatttaatatccgtttgcctgttcggatgtgtttcgtttgctgtttttatttcgtttgactatagtgtactttgcgtatgactatagttatgcgtaaggataactatagtctactttacgcataactatagtcatatgaaataatatcagctaacaaaggtagtaagattagtgagaaaaagaaataaaaacagcatagataatgatttctacaggaatccatcgcttcgttttttaataaattagctagaagtatggtatttattggtaaagaacacttatttttgcaccatgttacagtttgagaatcaaaagataaaacaaatagtacgcaaggtacttccggtagtaacactggtagtgatgctatattcctgtgccagtatcggacgaccggacggtggtcctattgacgagacaccaccccgctttataggtagcactcctgctgcaggtgctttaaataataagaggactaaagtctctctggtgtttgacgaatttataaaactggaaaaggcgactgaaaaggtggttgtttcccctcctcagatacagcagcctgaaataaaggcttccggcaagaggatacaagtgaatctgcttgactctttgaagcctaatactacttatacaatcgacttttcggatgctatcgtcgacaataatgaaggtaatccgttgggtaatttcgcttttaccttttctacgggtacggaaatcgatacgatggaagttgcaggaactctgcttgatgcttctaatttggaaccgattaaaggtatgcttgtcgggttacattccaatttgaacgattcggctttcaacaaattacctttcgaacgtgtggcacgtacagacagtcgtgggcgtttttctattcgtggtgtggctcccggcaaataccgtatttacggattgatggatgcggaccagaactttacttttaatcagaagagtgaaatgatcgcttttcatgattctctgattattccccgtatggaagaacgtacccgtatggacacagcttgggtggattctctgacgtatgatacgattgttgaaaagaaatatatgcattatttgccggatgatgtaattctccgtgcttttaaggaatttaattattcacagtatctgattaagtctgagcggcttatcccacacaagtttacgctctattttgccggtaaggcggacaccttgcctgtgatgaaagggttgaacttcgatgaaaaggatgcttttgttatcgagaagaatcaacggaacgatacgattcattattgggtgaaagattctctgctcttcaagcaggatactcttgctatgagtcttacttatctttatacagatacgttgaatcaattggtgtctcgtacggatactttgaatttggtgtcgaagcagaaatataagaaagaagaatcggaaaagcccaaaaagaaaaagaagaaaaagaaagatgaggaagaagaaccggaacctacaaagttcttacctgtaaaagtcaatgtcccttcatcaatggatgtgtatgggtacatttctttggattttgaagagccgatagccagctttgatagtgcggcaattcatttacggcagaaagtcgatacgctttggaaggatataccgttcgagtttgagcaggattcgataaatctgaaaaagttcaatttctattatgattgggagccgactctggagtacgagttttcggtagattcgactgcttttcatggtatatacggattgtttactgataaaataaaacaagagttcaaggttcgcagcgaagatgagtatttcacacttcatttcaatgttagtggagcggattcgttggcttttgtagaattacttgatgcccaagataaagtcgttcgtaaacggagagtagaggaggatggaatggttgatttctatttcttgaatcctggaaagtatgctgctcggttgattaatgataggaatggaaatggcgagtgggatacgggagactttgaaaagggcatacaaccggaagaagttttctattaccctactatcttggaatataaagcattgtgggatgtaacgcaaccatgggatattcatgcgactcctgttgataagcagaaaccggatgaacttaaaaaacaaaaaccagatgaagataagaagaaaaaagaacgaaataatcagaaccggcgtcgttaacgtccgacgcaaactcattattggattagtggcattaatgacgggcgcttttgcccttcctgcaagtgcccaatgtgaggcgaaaaatgatgcgtttcagaccggtgaacatgtaatgtatgatttgtattttaactggaaatttgtttgggtgaaagccgggcttgccagtttgacaacaaatgcgacaacttatcattcggaacctgcgttccggatcaatctgcttgctctaggcagtaaacgggcggacttctttttcaagatgcgtgacacgctgacttgcgtgatcggggagaagttggaacctcgttattttcgcaaaggtgctgaagaagggaaacggtatacggtagatgaggcttggttctcttataaggatggtctttgttttgtcaatcagaagcgcacatatcgggatggaaattttgatgaggcagttgcaagtgatagccgttgtatatatgatatgttgagtattctggcacaggcgcgttcttacgatcctgcggattataagataggggataaaatcaagtttccgatggctaccggaagaaaggtagaagaacagacgcttatttatcgtggaaaggagaatgtaaaggcggagaatggaacaacctatcgctgtctgatcttctcattagtggaatatgataagaaaggtaaggagaaagaggtgattaccttttttataacagatgacctgaatcatcttcccgtacgtctggatttgtatttgaacttcggttctgccaaagcattcctaaacgacgttagaggtaaccgtcatccgctgacttctattgtaaaatgagataggtggggaaataataactctcaaagggattttatttttctttttctatctcaaaaggaactttttgctcttttcggaacacgctggattcgaaggtcgcaattaagtctccattttgattggtgatatctacttgatagcaacctgtactccgaccgatgtaacgttcgtgtgcttcagcataaagagtatctcccggaccgcttgcacgaacgaaagtaatggtagatgaaagagagaaagcgagtgtgccgtgtgaattggcggctgcggcaagtgccagatctgccaaagtaaagatagctcctccttgtgtgcgtgctcccgcattcagatgttccggtttgatatctaatttggctttgctgtatccttttcgcacttccagtagtactatacctgtctttgtggcgaatatgtcattcttgaaaaactcttgtggtgtcataatttgttttttttaatttgatatgtatatttcttttgcaaatgtaccaaatttgtccttcatttggattatttaggtcggtcaattctatttaaatgcactacttttgccatcaagaaaattaatcacttaacaaataacccgtgtattatgaaaacaattcttagcgcattaggactttcccttttggtttttacgagttgcggtggacaaaaaaaagctgaagtagactttattcaggacaacattgacaacgcggtagcacaaaacactattcaaacagatattatcgagaaatccggtaagattctgaatccgagaacaattaacaaagatggtagtatttcttatatccctattgatgactggtgttccggtttcttccccggtagtatgtggttgacttataatttgaccggagacaaaaaatggttaccattggctgaaaaatatacagaagcattagactctgtgaaacatttgaaatggcatcatgatgtaggtttcatgattggttgtagttatctgaacggatatcgcctggcagataagaaagaatataaagatgtagtggtggaggccgccaaatccttatctacccgtttccgtcccggagcaggtgtgatccagtcatgggatgctgatagaggttggcaaggaacgcgtggatggaagtgtccggtgattatagacaatatgatgaatcttgaactgctgtttgaggcaacagccttttccggagattccactttctatgatatcgctgtgaaacacgccgatacgacgatggcacaccatttccgtccggataacagttgctatcatgtagtagactatgacccggaaaccggtgaagtacgcaagagacagacagcacagggatatgcggacgaatcatcgtgggctcgcggacaagcttgggctctctatggatatactacttgctaccgttatacgaaagacgaaaagtacctcgaccaagcacaaaaagtatataatttcatctttaacaataagaatatgccggaagatctcgttccttattgggattacgatgctccgaatattccgaacgaacctcgtgatgcctccgctgctgcatgtacagcttctgcactctacgaattggatggttatcgaccgggcaatcattataaagaaattgctgataagatcatggaaagtttgggctctcctgcttatcgtgccgaagtgggtacaaacgggaacttcatcctgatgcactcggtaggtagtattcctcacggtcaggaaatagatgttcccctgaactatgccgactattatttcttggaagcattgatgcgtaaaagagatttggagaaatgaatatgaataaacctatcaaccttctggtcggtggcttgacgttgtttgccgcacaaggatgcaaagctccgaaacaggtagcagagcaagtcgaacatccgaatattatctatgtattccctgatcaataccgtaaccaggcattgggaatttggagtcagaacgggtttcaggataaggtaaactttaagggtgatcccgtgcatactcccaatctggatgcctttgcacgtgaatcaatagtattgacttcggcacaaagtaactgtccgttaagtagtccgcatcgtggaatgctgctgacaggtatgtatccgaaccgtagcggtatacctttgaattgtaattctacacggcctatcagttcattgcgtgaagatgcggaatgtattggtgacgtattcagcaaagctggttatgattgtgcgtatttcggcaagctccatgctgacttcccgactccgaacgatcccgaacatccgggacaatatgtagagactaagcgtccggtatgggacgcctatacaccgaaagaccgtcgtcatggttttaattactggtattcttatggaactttcgatgaacataagaatccgcattattgggatacggacggtaaaagacatgatccgaaggagtggtcgcctttgcatgaatcaggcaaggtcgtttcttatctgagaaatgaagggaatgtacgcgatacaaagaaaccgttcttcattatggtaggaatgaatccgcctcacagtccgtatcgttctttggatgattgcgaggaagaggatttcaacctttaccgtagccaaccgttggatagcctgctggttcgtccgaacgtggatctgaaaatgaagaaggcagagtctgtccgttattattttgcgtctgtgacgggagtagaccgtgctttcggccagatcttggagactttgaaagacttgggactggataagaatacggttgttatctttgcttccgatcatggcgagaccatgtgtagccaacgtacggaagatccgaagaattctccttactcggaatctatgaatatacctttcttggtacgtttccccggtaaaattcagccgagagtggatgatctgctgttatcgtcaccggatattatgcctactgttcttggactgtgcggattgggggattcaatccctgccgaagtacaaggccgtaatttcgctcctcttttctttgatgagaaagcggagatcgtacgtcccaccggtgcactctatattcagaatttggatggcgaaaaagatgagaacggattggtacaaacctacttcccttcttcaagaggtattaaaactgcgcagtatacactagctttatatatcgaccgtaatacgaaacagttgaaaaagagccttttgtttgatgatgtaaaagacccttatcaattgcacaatttgtctttggaagaaaataaggaagtggtggagcaactctatcgtgaaatgggagccatgctgaaagaaataaatgatccttggtacacagagaaaattttgtcggatcggattccttattaaatgactaataattataaaacgcagattaacacagattatcgcagagattgaacccttaagtttacgataatttgcgttaatctgcgtttaagttaagaatagcaatgaaaaatataactctgatattattcttccttttcggaggaatttcttctgcttttgctcaacttatcggtttcgaagacggagttcccgaaacgtttaaagtttcagggaagggagatgccaaggtttcttctcttttctacaaagaaggggagaatagcctggaatgggattttcaccccggttctacattggatgtccaaatcaatccgttgtctctgaatgcgaaaaaagaacagcagtttggtattacgttgtggatttataatgagaaaccgcagcaggattctattcgttttgagttcctgaataaagcgggtgaggtctcctattggttttcgtatcacttgaaagcagccggttggcgtgcttgctggatttctttcgcatatatgcaaggtaataagaaggataagaatattgttgggtatcggctcgttgctcccggacggaaaggacgtgtctttcttgaccgtttgattttcccggagaagaaaatgaacctgaggacgactcccgaccaacagttaccggctaataacggtttgtccaatcgtgacctttggcactggtgccttgtgtggaaatgggaacagcagtcgtatgatatcccgttggcaactaagttgaccgataagcgaaagaaagaattgaaaacgatagaacagcgtttaacggattttctggaagtgaaaaaagctccgcaagggcagattaatgcagcttataagacatttgaaaaagcagctatcacaccttctgctgccggaacgggatttgtgggaactcctattgtcgctcccgacgagcagaataagaagaaaggggaaatgtcatggaatgatattgagaccatgcttgcaggttttgcatacgattatctctgtaatcagaacgaggcttcaaagaagaattactttacggtattcgattatgctattgaccagggatttgcctttggtagcggtatgggaaccaatcatcattatggttatcagattcgtaagatatatacgactgcctggctgatgcgtgatgcgatttataaacatcctcatcgggatgcttatctctctacattgcgtttctgggctgctttacaggaaacccgccagccatgttcgcccactcgggacgaactattagactcctggcatacactgctgatggcgaaattcgtttcggccatgatgttcccggatgcaagagaacaggaacaggcgttgagcggcttgtcccgttggctgtcttcttcgttacgctatacctccggaacaattggcggtataaaagtggatgggactactttccatcacggaggtttttatcccggctataccaccggagtattggcaacagtaggagaattcatcgctttcacgaatggaacgagtttcgagttgacggaagaagcccgccagcatataaagtctgcttttatcgccatgcgtaattattgtaatctttatgaatggggaatcggtatcagtggacgtcatcctttcggtggaaagatgggtagtgatgatattgaagcgtttgctaatattgctctgtctggtgacttgtccggtcaagggaatgcattcgaccgtaatttggctgctgattatttgcgcttggtacatggcaaagatactccgaatgcacgtttctttaagaaagagggtgtcaaggcagctcaagctccacaaggattctttgtttacaactatggttcagcgggaatattccgtcgtgcggattggatggtgacattgaaaggatatacaactgatgtctggggagccgagatttatgcgaaagataatcgctacgggcgttatcagagttatggctctgtgcagattatgggtaaagggaatcctgtttcccgtgccggaagtggttttgtgcaggaaggatgggactggaatcgtttaccgggtacgactaccattcatttaccctttgagttgcttgatagtccgttgaagggaactactatggcgcgttccaaagagaacttctccggaagtacttctttggacggtaaaaacggaatgttcgctatgaagttgatggaacgtgattatgagaactttacgcccgactttgtagcccgtaagtctgttttctgtttcgataacagaatggtttgcctgggaacaggtatcacgaacagtaatactgagtacccaacggaaactaccctttttcagacgaaatataatggtaaagacagtaaggtgggagatgatggctattggctgcatgatggttatgataattattatcatgtagtagacggagcagtccgttcgcaagtggcggaacaggaatcgcgccatgagaagacccgaacggtgacgaaaggaaaattctcttctgcctggatagaacatggtaagactccgaaagatggaacatacgaatatatgattcttatacaaccttcttcttccgatttggaggaacttcgtaagaccctgccatataaagtcttgcaacgtgatcaaacagctcacgttgtttatgataagggaacgggtattacgggttatgctgcttttgaaacctatcaatctgcaaatgacaaagtggttgcttccattccggccgaaacgatggtgatggttgcacaagagtcggacaagagtattcgcctgagcgtatgtgatcctaacttaaacatagaagagaaaacatatacaacgaaagagcctagccgccccattcgtaaagagatatgccttaaggggcgttggacgctaaagagtccgatggaaaatgtaacattgcggcaacagggagaaaataccgtattgacagtgatttgccaacatgggcaacctgttgagatgctcatggaaaataagtgattagtgaatattaagaaagggtattagttgctttagtttctatgaaagaagagaagaccggttcgtggtggaccggtcttctgtatttcttatttattcaatctccattcgaaaccatctttggtatctttgatttcgaacccgagtgctgtcagtgtgttgcgaatctcgtcggatgtcgcccagtctttattggcttttgctttcatacgttgttccagcagcatatctactactttcccgtatgccgcctcacggccatcggaagaacctttctcctctttcaatcccataatgtcaaaactgaacagatggaaagtctctttcagatctttcaagtcttcggcagagattgtggcattgccggcaatgatattatttatgatacgggcaccttcgaaaagttgtgcgatgacgataggagtgttcaaatcgtcattcattgcttcgtagcatttggcacgtagttctttaacgttgattccttctgaagtagtggcggctggagttattttctccaatgcgtcgatggcttccatcaggcgttgtaatcctttttcagatgcttgcaatgcttcgttgctgaagtccaccgtactgcggtagtgcgcttgcagaataaagaaacggatagtcatgggcgtataggcttgcgccaacaacttatgggtaccgttgaaaaactcatccaacgtgataaagttgccgagtgatttgcccatctttgttccgttgatggtaatcatgttattgtgcatccaatagtgaaccatatcgtccccctgagaagcgaccgactgtgcaatttcacattcgtggtgagggaaaaccaaatccattcctcctccgtgaatatcgaagtgttcgcccaaatatttgcgtcccatagcggtacattcggcatgccatccgggaaaaccgtcactccacggagacggccagcgcatgatatgctcgggttgcgctttcttccaaagggcaaagtcggcgggattgcgcttttcactttgtccgtccagttcacgggtcgtattcagtacatcgtccagattgcggccggaaagccttccgtaatggtggtctttgttgtacttggctacatcgaaatatacggaaccttcgctttcataagcgtaaccggcatcgagaatcttctgtaccagttcgatttgttcgatgatatgccctgaagcgtgcggctcgatacttggcgaaagcacgttgagcgcttccattgctttgtggtagcggttcagataatactgtacaacttccattggctccagctcttccaaacgcgctttcttttcgatcttgtcctcaccgtcgtcggcatcatgctccaaatgacctacgtcggtaatattgcgtacataacgtactttgtatcctagatgagtgagatatcggaaaagaacgtcgaatgtaatagagggtcgcgcgtgtccgagatgggcatcaccgtagaccgtcggcccgcatacgtacattcctacatgaggagcgtgaagcggtacgaacaactctttctttctatttaaagtgttgtaaattgtaagttgatgttccataaccttttatatttgttttattggaatcgcaaagttagtataaaatccggatatgtaggctattgttgatagataaacttctcaatggcttcggcaacgccatcttcctcattgcttaaggtaatgtagtcagccgcttttttcaccggttcctgagcgttccccatagcaatacccagtcctgcgaattttatcatggaaaggtcattgtagccatcccccattgctattatttcttcacgttttacacctgtctcttctaatagaacaccaagagacagtgctttatcaataccttgtggaactaattcaagaaaataaggttctgaacggaagacattgatacgtccttgtagctgaaggcatagttctgattccaaaggaatgagtcggtccggatctcccacaatcagacatttggctaccggcagggtgatatcagtaagaaaatcgttggtttcacgaatcgccattttattcagaaacgcttctttttctacgtatgggtcatgggaattctcagtcacaatctctgctccgtcgtaagtcaatatagtcagatggtatgtgcgggcagcttcataaagtcggggaatgatatcattaggcaacacgttctcgtatatcatttcatgcgtttcccagttgatgatttctcctccgttataggacaagatgaatccgccgaactcgttcatccgcaattcattggctagaggtacgataccataggttggtcgtccggaggctaagacaagtcgtacaccttgttcttgtacacgtatcaatgcctctttgttgcggagggtgatttctttcttggagttggtcagtgtgccgtcaagatcgagcacgataagtttgtatttcatgctgtatggttttggatacaaagatataataaaaaatcattttagcaagtccacccattgttcactactcaatgctggcaatgtttcgctatcagtaacgaatgtctctgccagttttcgtttttcgtcttgaagttgaaggattttttcctctatactgccttgagtaatgaaacgataggcaatcacttgtttatcctgcccgatgcgatgggcacgggctatagcttgtgattcagcggcaggattccaccaggggtcgatgataaatacgtagtcggcctgtgtcagattaagtcctactcctcccgctttcaaagaaataaggaaagcctgcacatctttttgttcggtgaaatgggctatttcggaaggtcggtcgttggtagctcctgtcagtaaggcgtacttccagccacgctcctgaaaggcctctgccagtacttccagatgtttgacgaatgaagaaaatattaatactttgtgtccttcactccgtagggtgtcgaaagtctcaatgatttgtgcagttttcccggaagatcccgtgaaatcaggaaagattagttgaggatgacacgccaattggcgtaagcgtagaattccgttcaatacactgaatgagtgcagtttgtccgtactttgaggatgttgaagcagaatattacgcaagctgtttttctcttgctcataccaggtgttttgttcttccgtcatatcacaatagattgtctcttccgtaagcggaggaagttccggagcaacctctcctttacttctgcggagaatgaatggagcgatcaactgttgcagttgtgcttctatgcgggtattcccttgacggattggtaacataaatcgcttttgaaaactgctttccgaacctagcaagtccggttgtatgaagtggaattgcgcccacaggtctttaagggaattctcaatcggagtaccggtaagtactagtttgtacttgctttgcagttggatagccgaatggaaggtgagcgattcgctattcttgatattctggctctcatcgagtacgatgtattcaaaacagtaggagcggagtatgtcaatattctttctcattgttccgtaagttgtgaacactaaatgaaaacgtctgaaaaacttctccggatgtgtcttgctgagaatactggtactcgtgtattctaccattgaaagcgtggtaaaacgttttgcttcccgacgccaattatgaagtaacgacgtggggaccacaataagtgtagcgggctttcgtggctttcgtgcttgtggttgtgatacattttccggattcatttcttttccacgaatctcgtttggttggggcagtaactcatcttcggagtcgaaagagaataaagagaactgtccgtcgatatccgcttttgcttcccggatggcgggagaagagacggtgatatccgcagtctgacgggcggttggggatattggcttatagatatattgtagcagggtaagtgtctgaagtgtctttcccaatcccatgtcgtctgccaggcatccgccgaatccttctttgttgagatgtaccatccacgagaatcctttttgctgatagggacgcagctgtgcttttagtcctttgggcggatgaatgctacgtatttctttcttgaatgtgggagtcttggatgcaggtgtattcaagatagtctctactacgcctatgaatgtatgctttaagcggaatcctttttctgtctggactcccatttccagcatattcgtgtatttgctgaaccactcttccggtaataaaatcattcgtccgtccggtagcaggaattccctcttctcttcaaggatatgttttcggaaacgtgtgaagggaatacgtaagtcaccgataacgacagtaatatgcagttcaaaccaatcgggattatcatcgcaactttgttcggtatgtatctcgtccaagcaataaggcgtattactcatattaccggataatataaaagattgttgtaatatttcccggtggctgcttatccattcggagagtgttctttcgggaatatcgggtgataactgaaagtgaacatcgctgatacgttgcaatccggcatttgtcaagaactgtatcgctcttttctctgcattggcatttcgccgaaaacagtatatttctccagattcgtttcggtaaataatcctcttcatgccggtattgttgtcttccggagtgaaggtttggtcgccataacgaaaactaagctgtagcaactgtttatcgtaaatcgtattttcgatgattaacatagcctcgcaatttcgcctcttctcgatcaggttcagaccctcagtcttgatgtcatgataacgggctatgggaatgagaatgttgtcaatatacttttcggtctcggaagttgttacgctgataacttcttttttggtaaaaggcaaaagtcggctactttcgatgtttggaaagaaatacagctccattcccaatgataaggtggtcggcatggatgttaacacattgacgggtttttgctcactgagagagaatggctcgcctttataataacattgcagttggtagcggaaaatattttcatctatctgaaatatgaaacgaatctcagcgtcatgtggatgtacgtggtaggcatgatgggcatacagcagtttacttcccccttgtttctgataaagcgctaacttcttttcacgtatcagagccagcatttcctgcaacttcttttcaataaatggacggacgttgttttttatccgttcggggtcttcggataatttatgtaggaagcgggagactgttttctctcgggagtatactcccatcaaatacttttccgtatagtgtgacgcgatgtcaatagcctgcctttccgcttcactcatccggttcatagcttcggcagaggcgtgaaatgcctgttctactaattgtaatgtgttgtcacttaatctttcagctatatagggtatgagtaatataccgagtacgggatgctctgtcaatacgatgataatttgtccgtcagatgttttctctttcattctctttaggctttaactgacaaagatacgggaaaatccttaattttgcagtatgatagaagaaaatagacgagtactgttgggtatgagcggtggtacggatagttccgttgctgccatgcggctactggaagtcggttacgaagtaaccggaattactttccgtttctatgagttgaacgactcgacagaatatttggaagatgcacgtagtttggcggagcgtttgggtattcgccatatcacatatgatgcccgtgatgtttttcgtaagcaaatcatagaatactttgtacaggaatatatggaaggtcgtacaccagtcccttgtacactctgcaataactgcctgaagtggcctttgcttgctaaagttgccgatgaaatgggcattttttatatagcgaccggacattatgttcagaaagtagagttggaaggtacctattatataacccatgccgctgatccggataaggaccagtctttttttctatgggggttgaagcaagatatacttcggcggatactgttgccgatggggaatattacaaaagttgaggctcgtgtttgggctgccgaacgcggtttccaaaaagtagcgacaaaaaaagatagtataggagtctgtttctgtccgatggactatcggagcttcctgaaagagtggttggcccgaaatggtcagttgcggtccgaaaatgtcagctgttggtccgaaatggtcagacgggggagattcgtcgatgaaaagggaaattttataggttggcatgaaggataccctttttacaccatcggtcagaggcgtggcttaggcattcatctgaaccgtcctgtttttgtaaaagagatatatcccgaaaagaacgaagttgtgttgtcttctctttctgctttggaaaaaacagaaatgcagctgaaagattggaatcttgtaaatccccaaaagattctgggctacaatgatgtcatcgtgaaaatacgatatcgtaagcaagagaaccattgcacggtcactgttacaccagataatttacttcatatacaacttcatgagcccttaactgcaattgcggcaggacaagctgctgcgttttatagagatggtttactgctgggaggggggataatagtgaatgcccgctaatttcgtaggaaagaggatgcggctgatacccaggtgccgatatacctgatacccggtgttggacataccgacacctgggtatcaagctagagtgatttattattggtttagcaatagcattgtctctatgtattcccgtgtattacttaatctgggaattttatgctgtcctcccaattttcctttttgggctaaccagtcatggaacaatccctgacgggcaacgatcacctccaacggttgcaatgcaatatctttccagcgttttgcttcataatcggaattaacctccttcagagtcgcatctaatattgctgcgaatttctcaaccgaatcaggcattttggcaaactcaatcagccactggtgacggcatttggcgttttcgtccataaataccggtgcggcagaatattcgctgacctgtgctccggtttccgcacaagccttagccagtcctttctcggcattatcgacaataagttcttcaccgaatgcattaatgaaatgcttcgttcttcctgtgataacgaatttataaggatttttgctggtgaatttcaccgtgtcgccaatcatatatctccataaaccgcaagaagtagaaatcaccatagcataattcttgcctaattctacttcctcaagacaatacgcctgcggattttcttttcccacttcctccaatggaacaaactcataaaagattccgtaatcaatcatcagcagcatggcaggatcagaaagatcgttttgcgtgccgaagtatccttcggaagcgttatacgtctctacataatgcatattcggtgaatgtatcacctgcttgtattgctcacggtaaggtgtgaaggccactccgccatggaaaaatacttccaaattcggccatacctcttctaaagtctgttttccggtcttttcgagaatccgtttgataagcactagcatccacgatggaacaccggaaaggctggttacatttgccggaatggtactgttggcaattgcttctatttttgtttcccattcgctcatcaatgcaatctttttgcttggaacacgaatgaaattaacaagtggatttacattttgaatcaagatggccgacaaatctccgaccagactgtggttggagttcagattcgggctgtggctgcctcccagtatcagtccttttccggagaaaaagtgactgtccggattgatacggaaataaagagctaccgcgtcttttcctcccctgtaatgaatatcctccaatgcttcttggctgacaggaagaaatttacttttgtcattcgtcgttccggatgatttggcaaaccagcgtatctccgatggccaaagcaggttctgctctcccgctcgtaaacgctccacgtatggttttatttcttcgtatgtctgaatggggagacgttttctgaaatcttcatagctgcggatggaggagtagtcgtactttttcccccattcagtctgggaagcctgttgcactaggcggtttaatacgcggtgttgtatctcgctggcttcactggcatataaatctatttgttttaaacgggagtcgaaagtcttgctgataatttttgtaatattcatttctgctttaacatgataatgtttattcgtgcaaaagtaaccttatttatcttttttttctatctttacgacggaaataatcgttaaaatcttcgagtttcactaaatctccgagtttttgactaataaataagacaatgagaattggaatcttaacctccggtggggactgtcccggtattaatgccaccattcgtggcgtatgtaagactgccatcaattattatgggatggaagtgataggtattcatagtggttttcaagggttgttgactaaagatgtggaatcttttacggataaatctctctccgggttactgaatcttggaggaaccatgctgggtacttcccgcgaaaagccattcaaaaaagggggtgttgtatccgatgtggacaagcctgccctgattctccggaatattcgtgaaatggggctggattgtgttgtctgcatcggaggaaacggaacgcaaaagactgctgccaaatttgctgcgatgggggtaaatattgtttctgttcctaaaacgattgacaatgacatttggggaacggatatttccttcgggttcgattcggccgtaagcattgctaccgacgctatcgaccgcctgcattctactgccagctcccacaaaagagtgatggttattgaagtaatggggcataaggcaggttggattgctttatattccggtatggcaggtggaggagatgtgattcttgttcccgaaattccttatagtattaagaatatcggcaatacgattttagagaggctgaaaaaaggaaaaccttattctatcgtggtggtggccgaagggattcagacagacggccgtaagcgtgccgcagaatatatcgctcaagaaattgagtatgagacaggtatcgaaacccgtgaaacggtactggggtatattcagcgtggtggttcacctactcctttcgaccgtaatctctctacgcggatgggtggtcatgcaacagaattgattgccaatggagaattcggacgtatggtagctttgaaaggaaatggtatatcgtctgttcctctcgctgaagtagccggaaaattaaaattagttacagaagatcatgatttggtgattcaaggtcgtcgcatggggattcgctttggatagcttcatcgactgttgccatgaatacaggatcttttacctttttgattgccatttgggcggcgttttgttgagactcttttttggaatatccggttccggttccggcaggaaatccttcgatccgtacctcagtctgaaatacaggattactgtcccggtcaaggaattgttcgattagttcaaaagagacttccatcttgttcttttggctccactcaatcaatttggatttgaagtttacttctttacgggataaaatgtccaggtcaatgtaacggttgatgattcgttcctccataaactgcttgcagcgttcatatccttgatccagatagatagccccgataaatgcttcgaaagcatttccgtacatataactgttgtgagaagacgaacgggtggaatactttatgagtttatccaatccgatttctacggctaacttgtttaaggtttcccgttgcacgatcttggaacgtgtgtttgtaaggaatccttcccgctttccttcaaaatgtttgtagacgatgtcgcctacgatagcgtcaaggatggcatcccccagaaactccagtcgttcattattcaacggacgccctttttccgaacggagggaggttgatttatgcaggagagcctgctcataaagctgaatattgcgtggatagaatccgagtatccggtaaaaacaaagataagactctctatccttgcggaataggagccttatcttatctattttgttacgtaacacgatattactcagcgtatttcttgaagataacgcacgcattatgaccgccaaatccgaatgtattggacaaggcaacattaacttcgcgtttttgtgctttattgaacgtgaaattaaggttatagtcaatattctcgtcgttgtcaccttcttcgtggttgatagtcggaggaacaatgccgttcttgatggcaagaatacttgcaatagattctaccgcaccggcagcacccaacaagtgacctgtcattgacttcgttgaactgatgttcaattcaaaggcatgatcaccgaatacttccttgattgcttttgcttctgaaatatcacctaccggagtagatgtaccatgtacattaatatagtctacttctttcggatccattcctgcatcttccaatgcattcttcatcaccagtttagctcccagaccttccggatgagaagcagtcaagtgatgtgcatctgcagacatacctacaccggcaacttctgcatagatttttgcaccgcgagcctttgcgtgttccagttcttccagaatcaggcaacccccaccttcgcccatgatgaagccgtcacggcttgcgctaaacggacgtgaagctttagaagcttcgtcgttgcgggttgacaatgcatgcatagcgttaaaaccgcctacgcctgccgggaagatagctgcttccgaaccaccggatacaattacatttgctttgcccagacgaatcagattgaaagcatctgcaatggcattggtagaagtagcgcatgctgaacaagtcgcatagttaggaccatggaaaccatacatgatggaaatctgtccggcagcaatatccgagatcatcttggggatgaagaacggattgaatttcggacccatttcctgacgggtatagtagttgcccacttcctcttcaaatgtatgtataccaccaataccggcaccaaagataacgccgattttgtttaagtcttctttttctatgtcaagaccagaatcttctaccgcttctttggctacaacgatggcatattgagtatacaaatccatctttcttgcttccttgcggtcgatgtattttgttgcatcgaagtttttcacttcacatgcgaattgggtcttgaatagcgacgcatcaaaatgagtaataggtcctgctccactaaccccgttcacaatgttttcccaaaattcaggaacgctgttgccaacgggagtaatggcgccaagacctgttactaccactctttttaattccatattgatgaaatcggattacttagcgtgttcttcgatataagatacagcatcacctacagtaccaattttttctgcttggtcatcaggaatagagataccgaattctttttcgaattccatgataagttctacagtgtcaagagaatctgctcccaggtcgttagtgaagcttgcttcgttagtaacttctgattcttctacgcctaatttatcaacgataatcgcttttactcttgatgcaatttcagacataactttaagtttttaattaataattagttttatttctttaaatttgcggtgcaaaggaatgaatatttatcgttttgcgcaaatatttgactaaataaatgcaaagttttgcacatttttcactgttttgtgcattgaatttgagagttatgaagaaaaacatcgcaatttttgcctccggctccggctctaatacagagaacattatccggtatttccgagaaaacgaagccattcaggtttcgttggtgctttcgaatagaagtgatgcatacgttttggaacgtgcacaccgtctgggagtaccttgtaacgtgtttccaaaggaagattggatggctggagatgagattctggctgttttgcaggaatatcacattgattttgtggtgttggcgggtttcttggtccgggttccggatttacttttgcatgcttatcccaataaaattataaatatacatccggctcttctgcctaagtttggaggaaaggggatgtatggcgatcgtgttcatgaagcggtggtggctgccggcgagaaaaaaagcggcattactatacattatataaatgaacgttatgatgaaggaaacattgtttttcaagccgcttgtccggtacttccgaccgactcacctgaggatgtagccaaaaaagtacatgctttggagtatgaacatttcccccgtgttatagagagagtattgtgtggagaataagacgtaggagatggtacgccttattctttatatttaattatataagcttgctcttctcttcttaatggatagtctccacgtaaggtttcgaatagctctggttgattttttaaccggtcgctgtcttcagccggattatatatttggagaagtgcattttcgtagttttctgcatgaatgacaggagaattcggtaccggtgcatgaatctcataattcctctctatccggaagaatctgcagatagcatctaaagacatacgtgttgcatttgctttcccgtcggcagaatatccggcaatgtgtggagtgcctatgatgacctttctgagcagttcgagattgatttccggttcgtgttcccatacatcaatgatggcatccgaaatcgatttattgtccaatgcttccagaagagctcccgtttcaatgacttctccccgagaggtgttgatgatgacgggcttgcgttttagtgagcggaagaaatttgtatctgccagatgaaaggttctgtattttccttctttatataaaggtacgtgaaaggtgatgatgtcgcactcttcagctatttcatttaaagaggtaaagaaacgattcccttctttctcttcccgaggcaggtcgttcaataggacccgcatcccaaagccttttgctacttttgctaccttacttcctacattcccgacacctatgatacctatagtcagtccctccagttttttgttcttcatcgctttccataccagcagcgaagcttgtacgtattgcgcgacggaagctgagttgcatcccggcgcattagtccattctatgcctgcttgtttgcaatattccgtgtcgatatggtcgaagccaatcgtagctgtcgctatgaactttacccggcttccttccaataattcacggttgcagtgtgtacgggtacggataataagcgcatccgcatcccgtatcagttctggtgtaaaatcctttccgggagcgtaaattgcttcatctgctatactctggacggcctcttttatataaggtatcttgttgtctataatgattttcatatacaatttatctttggtatccacaaaggtactaaataaaaaagtaagaaagggttgcttgtctgagaaatattacatagatttgccctattataatatctaatagctagttaagattatgacatttagtaacctttgcaacgagattttttggaaatcgactaatgattaccatgtaacggatagtgtagacgctcagatgaacaatccttacgaattgaagtcgattgagtattatttatatttgaaaaattggatagatgccgttcagtggcatttcgaagatatcatccgtgatccccagattgatccggtggctgctttaactttgaagagaagaatcgataagtccaatcaggatcgtacggatctggtagagctgattgatagttacttccttgacaaatacaaagaggtaatcccccttggcgatgcgacaatcaatacggaaagcccggcatgggctatagaccgcttgtctatccttgctttgaaaatctaccatatgcagcaagaggtggaacgtacggataccagcgaagaacatcgtacacaatgccagaccaaactgaatgttttgttagagcaacgcaaggatctttcgtcggctattgatcagttattggctgacatcgaagccggaaagaaatatatgaaagtatataaacagatgaagatgtataacgacccggcattgaatccggtgctttatgcaaagaaataacgaatggcgcgtattctcattatccgtttttcagctcttggtgatgtcgcaatgacagtgcccgtaatacattctctggcagtacaatatccccagcatgagataactgtactgagccgttccgtgtggcaaccgctttttcaggaattgccggagaatgtaagttttgtaggagcagatctgacaggcaagcataaaggcttttggggattgaacagcctttactcggagttgaaagcaatgcagtttgactatgtggcggactttcatcatgtgctccgttccagatatttatgtttgcgtttttggcttgctaatgtaccggtggcttctatctgtaaagggcgggctggtaaacagaaactggttcgccgccatcataaggtgatggagaaccagaaaagttcctttcgccgttatgcggatgtgttggaaaagctgggacttccggttctgctaaacttttcttctatttatggtgaaggaaaagggaactttgcagagatagagcctgtaactggtccaaaagggagccaaaaatggattggcattgctccttttgccaaacataccggcaagatttatccgttggaactgcaggagcaggtcgttgcccattttgcggcagatcctgcggtgaaggtttttctgttcggaggaggcaagaaagagcaggaagtgtttgatacctggatagccaaatatccctccatcgtatctatgataggtaagttgaatatgtgtaccgagttaaatctgatgagccatttggatgtaatgctctcaatggactctgccaatatgcatctggcgtcgttggtcaatatacctgtcgtctctatttggggggctactcatccatatgccgggtttatggggtggaaacagttacccatcaatacggtacagctggatttgccttgccggccttgttcggtttacgggcagaagccttgttggaggagagattatgcttgtctgaaaaatattactcctgaacaggtgatagaaaaaatagaggcgattgtaggttgattataaaaaactttgtatgtatgaaggaatatgattatttggtggttggcgcaggattattcgctgctgtgtttgtccggcaggcgattgaggcaggaaagcgttgtcttgtaattgataaacgtagtcatataggtgggaatatctattgcgagaatgtggatgatattcatgtgcatcaatatggagctcatatatttcatacagacaataagcaggtctgggattatgtaaaccgttttgtttcctttaatcgctatacaaactctccattagcaaattataaaggtaaattatataatctgccttttaatatgaatacctttaataagttatggggcgttaatactcctcaagaggcaaaagctaagattgaagagcaacgtaaagagtacgcatatataaagtctccggccaatctggaagagcaagctttgacgctttgtggaaaagatatttatcagaaattgataaaaggttatacagaaaaacaatggggacgttcagcaacggaacttcctgcttttatcatcaagaggcttccttttcgttttacttatgataataattacttcaatgatgagtatcagggaattcccaaaggaggatataatgagctgatacacaagttgcttgagaaggccgaagtacgtttgaatacgaattatttttccgcgcgtgaagagctggatgcattggcagataaagtcttatttaccggttgtatagatgaattttacgattatcgttttgggcgtttggagtatcgtagtctttgttttgaacatgaacgtcttgaaatagataattatcagggtaatgctgttgtaaattattgtgaaagggagattccttatactcgtattattgagcacaaacattttgagtttggtacacaaccttgtacagtgattacccgtgaatatcctgcggcttttactgctgaaaacgaaccctattatccagtgaatgatgatactaatatgacgcttttaaagaagtataaagatttggcgaatactacggcgaatgttttgtttggtgggcgtttggcccaatatgcttattttgatatggatgatacggtggaggctgcattgaacctggctaaaaatgaactaaaaaaagaattatgatttgctatttatcaaggaactataagggtgttaataatgctgccaacaaggctaaaaccgatattgaatatatcatggagcagtgcggctatcgtaatgtcgggcttaagcagacccgttatacaaatgctgtcatagcttttattttgacgctgtcgggtgtgttgaagagcgtattctgtttacataaaggtgatgtgttgatactgcaatatccgttaaagaaatactatacatttgtttgctgtatggcgcatctgcgcggctgtaagataattactttaattcatgatttggacagttttcgtcgccgtcgcttgactatacctcacgaaatatcaagattgaaccattcggacagcattattgtgcacagtgaacggatgaagaattggttgcatgagaatggtataaaggcaaatctggaagttcttggggtctttgattatttgtcagataggcagtcttcagggaagaatttagcagcttctcatcctcgtgttttgtttgttggagcgttatctacttttcatagtgattttttatataaattgggacgttctccacgttcgttcgatatggtactttatggtaatggctttgaacctgataagtttgaggggcaagtagatcataagggatatactcggtcggatgatcttatagctacagccgaaggggaatacggattggtgtggtatggttcctccctagaggggggagtcggtccggaaggagaatatcttcagtataatgctccacataaattatctctctatattcggtgcggacttcccgttatcatttggaaaaaagcagctttggcttcatttgtagaggaaaatggtatcggtatttgtgcctcttctttattagatctggacgctatcatcactcagatgacaaaagagtcttataatgctttgagaatgaatgttgctaaagtgaatgagcgtatttctcaaggatattattgcaaagaagccattcggaaagcttatgccaaattatctccggaaataaaatgagattatttcagccggaatgtaataagatttagttatctttgcggtgtgtttcttttgtaatgcttgcacgaggctagacacgattatttatattaattgataatgtatgaatatattggtaactcacaaggcggtggatgtggcaacttataagatgttgggtgaattgtcaaagaatgagtcttatacaatttatttaacggttccttccgcttctgaagctgcaaaagtagagggaaaatgtatccctttgccaatttctcctattacatctaaattttcctggaaagtcatcaagacgcttcgcagatatgtaaagcaatatgatatagatttgattttctcaccgagcacatccggactatccaatgctttgattgcgacaataggcacttccgtcaagaatgtaggttatcggggtactcaggctaaggtgaaaaaacttgatcctacctattatatgggaatattaaatcctcgtgttgaccatatcgtatgtgagactgcggatatacaagaatatcttacgaggtacattgataaggataaactgtctgtcagcgtgaagccgtttgatatagactgggtggctgatgcctgtgcgaatcctaagcaggcggaaggagtgcccgataatgcttttaaatgcatttatatcggtacaaccaaaggtcgtccgtttaaagggctcacttatctgataaaagcttttcagatattgaatgctccggaggcccatcttgttgttatcggtgattatgataatagtgattacgagctggcgcagcaaggggtgggagcagaacgtattcatttcttatggaatcgcgaagatgcgatttcttttctgcctaaacaggatttatttatcctaccggctctgcgtgacgcctctcctcgtgttgtccgagaagcaatggcatgcggagtaccgtgcattgtcactgatatacccggtgctcgcgatttaatagtagacaatgaatcaggtatcttggttccttcgggttctgcagagaaaatagctgaagccatgcgctcattgatggatgatcgtacaaaattgcagaaactggctaaggcatcccgtgagcgtattattaatgaatttagcgtagaagcttatgtatcttatttcgataagctttttgccagtctgtcataaatgttgcactataaatgataaaaacatatgcaatcgcgtaaaatcttatggttgttcattggttgtcttttctttaagttcatattgtttgacttggactggagcctgaataccacattctcatcattttcttttccgcaaacctacttgacgaagtttctgctggcttccctgttggcagttccgtttctttatatacgctccagatggtatctgattacagtcggtacattgattgaccttctgttaattgttaatctgatgtatttccgtacatattatacttctattccttgggacagctatttccttgccggcaatctttccgactttactgcaagtgtttttgattctctgcgttggtcagatctgggttttccgctattgacggtgctgttccttgtcttaacccgcaaacaaaacctaaaggttactcttaaggaacagagaagaaaaagcttgagactgttggcgggatgtatctgcgttccattgctggctcttggcggaattatagcttattatggcgggtacaaaaaaacttatgaagcacttttgactgattatcagacatgcgggactcccatatacactatttttggttctctttattatgaacatgtacaagataaaatagagtacaccccacagataaagaaagaaattgaagattggttgagtaaacatccccgacggcagccacttccctttcagatagaagcacgcgataattgtattattattttggcggaatcttttgagagttgggtgcttgagaaaagtgtggaaggaaaagaaatcactcctaatctgaatcgcatgctgaaagaagagaatgtattatatgctccttacgtccagacacaggtcaaaggaagtcgttccattgatgggcaattactgttgcataccggtcttctacccataaactatggtgcttatagtgctcgctttcctcatcatacttattatagtatagataaagcttttaaagaaaaatatgaaggaggcggaacctgctgcatgacggtagataagaaagttgtatggaatgttgccattgttgcacaagactttggttacgataaacttttggacaagccctattttgtactggatgaaaagacgggaccacgtcatcgtttgggagatgtctcttttcttagacagtgcggagaaaagctagctacggaagaattgttcccgaccggtggtcacacgttggtgcagtgtgttacctactcaggccattccccgtttattattccggaagaaagcaaacggataagtttttcggataagctgccggaacgattaaggaattatatggttgtggccaactatacagattatgcaataggtcaatttataacttttttgcgttctcagaagaaatttgagaacacgatgattgtaataaccggtgatcatgaaggatttggtttgaccagaaaaccactttatgaacatgctttaggaaaagatattatatcccctgagcgtttcacaccactgattgtattaaattccccagtacatttacgttacgagaaagtcatgggacaagtcgatttgtatcctactttgttggatttgcttggggcagatgattatccatggagagggttgggagagagtatactgtcttcggggaagaaagcttttgctatttctccccaaatggaaatcataggtgatacagtcggtgtttctacggcagagattcaacatgcaaaggatgcatggagagtttcagatttaattataagttgtgattactttgctcatggtagaacaggagataaaaaataaaagatgaggtatgaaaatagtagtgaatcctacatacgagcatttgcgcaagtttatagagagtgttcctgatacttttgaacgggaaggacggatcatctactccggaaggaatctgataaaagtgatggaagtcgacgggatagagataaatgtgaaacgctatggaattccggctttggctaaccgtatcgtctattctttttttcgtactccaaaggggaaacgtgcttttgaatatcctcaaatgctgcttcagaaaggtgttgaaacaccggctccaattgcttatattgaagaacggaaatgcgggttgataaattactcttactttgttagtatgcagtcaccctatcaaaggaatttctatgaatttggaaatgcagatgtcgaacgttgtaaagatctcattatagcatttgcacaatacacggccaatttacatcaggcgggtattatgcatcgcgattactcaccgggtaacatcctgtttgatcggatcgatggagaataccattttatgttggtcgatattaatagaatgacttttggagagatcagtgtcgatatgggttgcgctaattttgctcggttgtggggacagaaagcttttttcgaaatgcttgccaaagaatatgcgaaagcccgtcatgctgacgaagctcattgtgtggaacgtgttttggcatgtcggaagaaattttggacttattttgcgaagaaacacatggtaaaatataaattggaactatagaattatgcgtattgttctgttttgtgaaaacaaatatgctattgatatattgtatcccatttatcaggaagcattgaaatcagaagataaccaactgttgtggtatattcatcttccgaagattccggtattccctttgcagaaagaagttacctatacgcattctatacaggaagtttatgatttctctccggaagcaatatttgttccgggcaatattgttccatattatttgcctggagtgaaggtgcaggtgtttcacggatatgctgcagagaagaaagatcattgggtgatccgtcggtattttgatacctattttacgcaaggtcctttctttactaagaagtttaaagaactggcggtaaagtatggtgattttgaagtggtggagacaggatggcccaaacaggattggattaaaacccattggcatgattttgatcaggaacgggagaagctattgagagagcatggtaaaaagcagatagtgttgtatgcaccgacgttttcaccatctttaacatctcttcctgcattaaaagaagctttgttgcatttagtaaagatgagggatattgtattgcttctgaaatttcatccgttgacacggaaggaatggattgatgaatacaagcaactggctgaacaagaagaacatattgtatgggtggatggttttaacgtcacgaagtatcagttgatgtcagatgtgatgataagtgacacctcttccaccgtttatgaatttcttcttctaggacgaccggtcattacctatcgtactattgcaaaagatatttattggactgatataaccgatgtcactcagttgatggaagcgtttgaaagagcacaatataatgaagaagacatcgccaaacgtcgttggattgtagataattacgatccttatttggatgggaaagtttgcaggcgaatgctggatgcagtagccgattatattcatcgtcatggagtacccgaaaagcgtaagcttaacttgtggcggaagtatacaagcataaagaaatttgggagaataaagaagaggtgagagaataaatgttgaattttaattgagcgaaatatgaagtcatatgtttttcctggaaatatagaagactcgatcctccaaataggagggaagccttttccttatatgcgcacagcgcaattctctgagcttgtgaaagactcggagagaatgttgttgcatttgataaactgtccggagggacgtgtgatattttatacggcctcaggaacgggagcgatggatgctgtggtggctaattatgtctctcaatgtgagaaagcttttattctggtaggcggctcgttcggacaccgttggaagaatctttgtgattattatcactgtccgaacgaaatatttgaggttccttttgcccgtgatatagactatgtgcaattggaagagcgggtacgtgcatcttgtcctgatgtctttttatgtcaacatcacgagacctctaccggacaactttatgatatggagaagatttctgctatctgtaagaagtatgaggtatctttggtggtagatgccatcagttctttcttatctgataccttggatatgtccggttgggggattgatatctgtatcacaagcagtcagaaaggtttgaacatagctccgggattgtcattcttgtttctttctccccgagtgcttcagacagttttctcgcataaatcttattattttgattttgaagagaatctgaagaatttagaacgtggtcaaactccttatagtcctgctactaccttattccttcagttacatgcacgtttgcagagcgatatgaagataggtgtggacaatatcattgcatccgtacgggcgaaagctctttattttcgtgaactatgtaaacagaataattgggaagtaccggccgaagttccttcaaattgcataacaggattctttgttcggagaaatggtgatattctttttaaggaattgctgaaacaggagatttttattatgcccggcggaactccgaactatttccgtgtgtcccatctgggtgttcagactaatgaagatctggatgatttggcaaggagaattaaagaaatagaaaaccgataaatctatatagttatgaaagaaaagaaagttagagtatttacatccggcagttttgacttgttccatattggtcatttgaatatcttggagaagtcagccttattgggtgatgaattgatagtaggggtaagtacggatgaactgatacaacactataaaggaatgccgccgattattccttttgagcaacgtatgcggattgtttcctctatcaaatgcgtgacaaaagtggtgaagcaggtgaaattgacagagattgctcaattagagagagaaaatattgatattgtaactataggagatgattggaaagacaaatatttggaaggattggaatggataaagcagcaacccggaaagagagtagtatattttccgtatactcccggtgttagtacaacgggtattaagaagagaattatagagagtacaaatgagattattgcggctgcgctgcaacgggaggctgagttggattataactggccggaagatgagaaaaagtaatgaaagtagaatttaaatcttattgaaatgttagtctcattattaatatccacatataattggaaagaggccctgtctctttgtctttatagtgtctttgcgcaaactgtgaagcctgctgagattctgatagcagatgatggttcgcgtgaggatacacggcaattaattgatgaaatgcgtgagaagacagatattcctattgtgcatgtatggcatgaggataagggctttcgcctttcagcgattcgcaatcgttctatagaaaaagcgaagggagattatattattcagattgatggagatataatcttagacagacatttcattgcggatcatttagaactggcggagaaagggtattttgtttgcgggagtcgtgtgcttttaggaaagatgtctacaactcgtcttttaaaaggtgttgagaaatatccggctcttctaaaacagaatcttagatttgtgttaaatgcttttcgttctcgggtgcttaggcgttatttggctaatcgatatgcaaagcgtactatgttacgtataagaggttgtaatatggcattttggaaagaagacttggttcatgtaaacggttataatgaatctttagagatgtgggggcaagaggatgtggaaatatcttatcgattgattcatgcaggcattcaaaagaagcaattgaagatgggaggagtgcagtttcatctttatcataaatttgcttccagggaaaatttggaatatcatgagcaggttttgagaaaagttattgaagaaagaattgtatggtgtgaaaatggaatagtgaaagatatgcaaactgctaagctatcatgagagcgaaagttgtatttgtagtcacaggatatggggaaaacgtaaatggcggcgttgaacagcattgtaaaatgttggcagaacgattagtgccagattatgatgttgaagttttatcgacgtgtgtacagaactatgttaaaggagagaatgaactgcctgttggggatgaatgggtgaatggggtgcttgtgcggcgatttatggcagaacctatccgtccggatctgcatcgtttttatgtacgaaaatctaaatggattcggaagttcaggaagatactttatcaactgaatattttacgctttattgctgacatatgtcctgtctggcaacagatgaatcagatggaacagagagtaatgcaaagttatatgttttactcgcctcgtttaatagctcatgtacaaaaatataagaatgagtatagagcaattattcctataaatatatcttatccattagcttattacacatcattgtgtgctccggataaaacgattctgattcctaccatgcattatgaaagctctacatttcgagctatttatactgaggtttttacgaatgtagcttatataggtttcaatactattgcagaacaacggcttgcagaaaatatatttggtaagagaatgtcttctcacggagttataagcgttggtattaatgaagctatagatgctgattgggatgaagttaaaagaaagtatggtttgcctgaggaatacttgctttatgtaggtaggatagataagggtaaattgaatcatattattgagtattttctttgctataaaactaagaacataaattcagaacttaaatttgtgctagttggtggattattttctgctacagtcccgcattctgatttggtttatacggggtttgttagcgaaaatgaaaaatatgcaatcatccgtcattctaagattatagtgaatccttcgaaatttgaaagtttatcattaattcttttggagagtatgcatcttggtaaaccgatgttggtgaatgggaaatgtgaggtattaaaagagcattgtagcagaagtgggggagcagctcttgcttattggaataagaatgattttatatctaaattggctagcttggaagcgtctgatgaacttcgtatgcagatgggggagaaaggaaaacagtatgtgaaaacatattattcgtggagtgtgataatgggacgtttaagaaaagcaattgagactgtggcaggaaattgttgaaatgggttgaaatgatggaaaaaaaagatatagttgtagttattcctatctataaagcgactttgacacagtatgaggaaatgtcattaaatcaatgtgtaaaggttttagctaactattcccttgtggtgattaagccgacgagtttagatataaatgaattgttgtcgcaatattcgttattgaaagttgaaaacttccctgatgattgtttttctaatttgagagcttataacaaactggtattgagtgaggatttttatcaaaggtttgttgattaccagtatatgctgatttttcagttggatgcatatgtctttcgtgatgaattattagattgggcaaagcgagggtacgattatattggcgctccgtggttgccggaacgactggaagggaagatgggcaatggcaaatgtattttgttaaagcgctttttttacaggttgataggaagtccaaaattgagacgatggaaatattttacatatgaagtcgggaatggtggcttttcattgcggaatatatctaaaatgatagcaattacgcgtgaatataaaagtaaaattgctcaatggttggatgatgaaaagcctttctatccggaggatgttttgctttttgttgaaattaggaagaaacagtatcgtttgcgaactcctcgatatgacaaagcgctgcaattttcaatggaagtaggcgcagaatgggcgtttaattataataaacggcaacttccttttggttgtcatgcttggtatcataaagagtattatccattttggtctcgtttgataaaaaaggattgacgctctgtcatgtgccttgtgggttagttataatatagattataacgattctgtataattattatattgaaagtatggtatcaattattatttgctctgtttctcctttgcttttagaagatttgaaacaaaatattgcacaaactataggtgtggaatatgaaattattgcaattgacaatcgtgaaaaacactggcctatagcaaaagcatataattatggggcacagcaagcaaaatatccatatttgttttttgtgcatgaagacacaaggctgttatctgataagtggggagaatttataattcctaagttagccgaacccgaatgtggagttataggttttgttggagacaaagcaagattctcgtgttgtagtggttggtatcaattttgcgatatgagtaaagtgagttatttctatcaaagaataaaagaagggaagactttatttctggtagagaatgcagatttgaatcagccatttcaagaggtaataacgttagatggtctaggcttttgggtaagaaaggatatttgggaaaaatatccgtttgatgaggagttgttaacaggatttcattgttatgatattgatttctctttacaaatagcaactgcaaattataaaaattatgtgtgttgctccaatcagatgttgatagagcatttttcacaaggaaattttagtgatataaattggttctccacaactttacgcttacatgaaaaatggaagcatttattgccaataaagacatcagatcttaatatatctgaaagaaagatccgtaaatgtgaggagttggcatcttatgattttttgagacaggtattaaaatcagactgtgatattatgtttaaaaggaaaatttttaagatgtttttgtgtcgtcctttttcatggaggcatttgacaaattgtatttccgccattataaaatatatgagatatgcttaaacatatggagcagaagaatgaaagtacccccttggttacagttattactgcaacttataacctgattgaaaataagagggcaaaatttattattcaatgtttggggagtgtacataatcagcattactcaaatattgaacatatcgtcattgatggggcatctaatgatggtactttatcactacttaaagaatatgagagtcaaggttggataaaattgttttccgaaccggatgcaggtatatatgatgccatgaataagggaattttaaaggctaatggtaagtatattagtattctaaattcagatgatttttttcacgatccagaaggaattgcaatcagtgttaaactgttggaagagaatgatgctgattattcttatgcggatgctcgtgttcttaagaagtcgggccggaaatttcagtggaaaggagatttgtcaaagttacttgttggagaacattattgccaccagaccatgttggttaaaacggaagttttaagagatatgggtggcttcgatttgtcttatcgtgtttctgcagattcagatctgatgattcgcctttatgctttgggatataaacatcagtatgttccacattgctttgtaacatacagatatggtggatattcttttcattatgatgctcagtcccgtaaggatcattctacttctttctttcatcatataggttgtcatataggcttgagtgaagatgattgttttcagctctggcaactgaagtttattaccgagcaaacgtataaagaacagctggcgcttgttcataaagttccggaggagtttgggcgagactatgtatatgcggaactgaaaaaacgtaatccgcttggtggaaagcaaccggagaagaaaaggtattatttatttggttttatccctgtatttcaagtgtcgtttcaaaagaatacttatacttatagtttattcggaatatttgaaattctgaatgttacatgctttaacggaaaatggaattataaattattaggtgttattccgattctgaaagttaaatattgcaagtagagagcctgcctatggatgtgattgttaatagtttgtttttctatcatttttttgctaaatagtttgaaataattaattttgtatttataaaatttataaagcatagtcctagaccttttgttctgtgtgattccgttgaattacatttagattaagcattaattaaatatactgtaaaatgccttttattcaggtggattgatgaattttattgatggcatttggtaaaattgacgtttgttaatttattatataaataatctatggttatggaatgtaaaaggggacttgtttcagttgttataccatgttataatcaggctgtctatttgtctgaaacattagattcgttgttgaagcaaaaatataatttgtgggaagggattgttgttgatgatggttctccggataataccaagcaggttgctttagaatatgttgagaaggattcacgttttaaatatgtatacaagcctaatggcggtctttcttctgctagaaacaaaggaataagtttggctgttggtgagtttatattaccgttggatgcagatgatattatacaaccagaatatttggaggaggctgtgaatgcatttcaaaagaatccggatactaaactggtatattgtctagggcagttttttggtgaaagaactggattatggaacttgtcatacaagggatataaatctcttttgattagaaattctttattttgttcagttatttataggaaagaagatgctttgcaaattggtggttatgatgagcgaatgcttttggggtatgaagattgggaatttcttatacgttttttggatgagagtagtgtagtacataaaatacctcaggtcttgttctattatagaacaaaagcggtttcgatgattactgaggccgataaaagaagggaggaactggaagagtatatttatatgaaacatcatgataaatatttcatgtattatggcggaacaattagtggattacgcagattagagcactatgattcggaacaagaatgtactacagaagattttgaatcgaggctaaaaagttttagagagcaatacgatttggagctagggtattataaacagaaaataaatagatatagaaacaagtggtataggcgttggtgcagagcttttcgtgatacattaagaaaattcagaggtcggtcttgagcatatcgagagttaaattgtacatgtctgcataaaaatggtttaaatatatagtgactgtatcaaaagaaatccttttcttgcaggatattataaatatatgattctgggggcatatattaactgtaaatctctgctaaaatggtgaatatgattagtctgattgctaaaaaaatactatttatatctttctttcttattcttttttgctgagtaattagaaatggttaattttgcaccctatatataataactaaatttatgctgaaacagttctttactttaatgaagcgatatattgaaccatatcgtaaatatcttgtgggctctttgatattgaacttcttgtcccaatggcttaatgtgttttcttttttagctataatcccaattttgaatatattattcaaaattgatactaaggtttatgaatatcagccgatggatttagcacatttgaataaggatgtgctaatgaataatgcttcctattggataaatcaatctatagaatctcatggtgcatttattgtactcattgtcatggggtgtatattaatcatagcaactcttttgaaaacggccggttattttgcatcttctgccataatggttccgctgcgtaccggtatcgtacgtgatattcgtattcaggtgtatgccaaggtgttaagcttacctcttagctttttctcagaagagcggaaaggtgatattatcgctcgtatgagtgcggatgttaccgctgttgaaaattctttgacgagctctattgatatgcttattcgtaatccgatagcgttggttgtatgttttattactctgttttcggtaagttggcagatgacattgtttgtaattgtcatattgcctttggcaggatgggttatgggagttgtcagccgtaaactgaaacggcagtcggctactgctcaatctcaatggggggatattatgtctcaattggatgaaacattgggagggctacgggttataaaagcttttatagctgaaagtaaaatgttagctcgtttcactaaaacaaataatgaattcagggacgcaatgaatgaaatggtgatacgtcaaagttcagctcatcctatgagtgaattcttgggtacgtgtgtgattatcattgtactatggtttggcggcgcattgatcttaaataattcttacgctcctatggatgccgcaacttttattttttatttggttattctttatagtataattaatcctttgaaagaattctccaaagctttttacaacatacctctaggacttgctagcatggatcgtattgatatgatacttaaagctgaaagtcacattaaagatcctgttaatcctttgcctttggataacttcgaggataaattaagttttaaaaatgtcagcttcagctatgttgagggaagacctgtgttgaagcatatcaatttggaagtagcaaaaggtaaaacagtagctttggtagggcaatctggatctggaaaatcgacattggttgatttgatacctcgataccataatgtgggggaaggtgaactgttgattgacggaaaaaatgtaaattctgtgtcaatacatagcttgcgttcattaattggaaatgtaaatcaggaggctattcttttcaatgattctttctataataatattacattcggcgtagagaacgctactatggagcaggttattgaagcggcaaaaattgcaaatgcccatgattttatcatggagacagaaaaggggtatgatacgatgattggagatcgaggtggtcgtctgtctggtggtcaacggcaacgtgtcagcatagctcgtgcgatcttaaagaatccgccgatattgattcttgacgaagcaacgtctgcattggatacagaatctgaacgtttggttcaggaagctttggaacgattgatgaaatcgcgtacaactatcgctatcgctcatcgtcttagtactataaagaatgctgatgaaatatgtgtgctttatgaaggtgaaattgtagaacgaggaaaacacgaagaacttattgcattaaacggatattataagaaactaaatgacatgcagagcttgtaagtagatgttaatttattcctaaactatatatgaaaatatttaagaagataaaaaagtcttttgttaagaaggttgtatattatagtatttctaattctcgcctttttgataaaaagtggtatttgagtcaatatccggaaattggtaaagttaatcctgttaaacattatttgaaaaaaggatggttggaaggaaaaaatccatctgaaaaattttccacgagtaaatatttatatgcttatccagacgtacaatacaggaatatgaatcctcttgagcattatttatttcatggaaagaaaagaggtcggttgtgttttaatgtcggtcagattggcattgagaaaactaaaaaaacggatgctagaccattgattagtgttattgtagcaagttataattacgcggaatttttgcctcaaactcttgattctctattgtcgcagacctatactaattttgagattgtaattgttgatgatggttcaactgacggatctacagatattataaaaaggtatttgtctgaaaataataatataaagctttatactcacccgggaaatgtcaataaaggactacctgaaacaatacggttagggttagcagaatcgcaaggagaatttatcgcattttgtgaaagtgatgatatttgggagtcacatcatttagagaagaaagtggatataataaatcgttatcaagatgtaaaaattatatctaataatgtggctttgttcggtgaagaaaaagcagtcaatgcccgtaaaaaatatgtggaagatttaaatgcttttttatccgtaggaggaaataaacttgatcttggtgctcataaggaaatgaactatattcccacactttctgctgttatgatcagaaaagatgtttttcagaatttagattataatacgccaattcctgcttggattgatttttggctatatcgacaaatgctgaaaagtgaacttttgttttatacagcagataaacttacgtattggagacagcacaactcatttaatggtataagtaatgtagacaagtatgcagctgaacgcgattggtttatttacatgaatgatttggtgaatggctttaaagtgtcgcggcgaattttgaagaatttaaagattttgaagaaatcgcttctatttgactctacttactacagtgagaagtatgctggtttacttaatggcgtcgatcccatgatacattatttgttagtaggttggaaaaaaggatgtaatccgtcggcttcttttaataacaatgcttatttgagcaattatgtggatgtgtggttgaataatgttaatcctttgattcattatgagcgttatgggaagaagcaaaaattgaaagcttttcctgtgggaacggaagaactcttagaagtacaggaatcagatattgagattgttaaagaatggaagaaagatactaaaacggtcttgcttataagtcatgagttgtctttgacgggggcgccacgtgctttggtaaatatggctataatgctaaaaaaatcaggaataagacctgtaattctttctttgaaacatggaccaatggaaaaggaaattgccgatttggatattaaattattggtagaaccttttctattgatgaattgtggtttaagacatagggctcttttccgctttttgtctgtttttgatgtcgtagtgtttaatacattagagactgtatggcttattgaacatttttcagagattgaggcaagaaaaatttgttggttgcatgaaggacgttactcttatatgggatggacgagatttaaagacttgtcgatgttattttccaaatttgataaaatttatgctgtaggtgagtattctaaatcttttgctgatccttatattttcgataaacgcaaattgggtgttttgttgtatggaatacctgatgttgagatgaaggtagcaaataaaactttagataatagtaagattaagttcttattgccaggaacactttctgatagaaaaggccaacttattttattgcaggctttggactttttatctaaaaaagttcgtgaacagatagaaatatatattgcaggggctgcaatagagaagaaagtagaaaaggcaattaaacattgtcgttattcatgtgtaaagtatgtcggcgaattggaacatgaacagttattgcagttgtttgctaatgtggatatagcattgtctccttcattggatgacccgatgcctattgtttgtacggaggcaatggccttggaaaaaggggtgattgtgagtgagaatactggtacggcaagttttattgagaatgggaaaaatgggtataaggttcctgctggtgatccggtagcgttggcagaagctatagaaaaaatggtattatataaggagaagttgccaatattggggaaggctgccagaaaaatatatgatgagaatttcacaatggatatttttgaaaagaatattgaaatgttgataattaagggatagcattttgctcagtgaaatattttggttatttttaacggaaatttatttatggagatacggctatggcatatgtagataatttatgatagacaataatgaataatattccagaaaagaaattattatttcttttgtatgacagaactgttatctatttgatattagtgatgttactttatttgagtatgggagaagtgtaccataatattcaaatacattatatcaaagattatgtgctgttccgtagatggggggatgcaatgttaatagcttttcctttgttatttgtacgaaaaaagattcttgctttcccttatttattgttgattaatttatattttctgtctattgtttggtactatcgtgtttattctacaataatgcctttgtcatcttatttgatggtttataacttagatggactatctcttagcatttttcgacttgctaggtttagggatatatttgtagtttttccttctgttttttggggtatatattattgttttgtatataaaaagataaattttcttttatggacaagggttagaacatcattgtttggcttattattatttggtggaattataacatattatgcttgtaaacaaaatccagctcccggttatgaatcgttgaatggacttcatacgatagaacccgtacgggcatttaaggagtttggtttcgttcattattggatttatcagatcggaatttttcaaggtgtttctgaaaaggaaaaggaatacgcgagggaggttatgcgtagtttagaaaatgggaataattgtgcaaaaaagaaagttgaaagcggccggaatttaattttgatattggtcgaatctttgcattcgtggccaattgggatgtgcattgatggggttgaaattactccgcatataaatttcttattaaagcaaaataagacagtttactttcccaaagagatgcctcaggtaaaagatgggagatctagtgatgcgcagttgatcattaatacaggaattctaccattgcttacaggggctgcatctgcttgctatgctgcaaatacatttccttctcttcctgcggctttgcgagaaaaaggttatatgactgcttcctttttgtgggatgacaaaaactattggaatcaagaggcgatgtctcatgcttatcattttgaacgtttatatgatcggctacgagattctgagaaatttgagcaggctgacgaacagttgtttgaaaagacacttcctcttttggtaaacctgccacagccattttatgcacagatcgttactatgtcctctcattatccatggattagatcaccacatatgaaaacccttcttgatgatttggaaataaagaatgaagatgtaaaaaattatatggtaatattgcagtatgttgatgaatgtatatggaaatttgtaatacagctgaaagaaagggggatatatgataatagtattattgtgataacaggtgatcatgatgctcttccttataatgaatatgaggggcgcgaagagctaagaggagaagattgttttgtgccttttatcattttgaattctccattaacttcggaacatactaataaggttattggtcaagtggatatatacccttctttgttggatttgatgggatgtacagattattcatttacaggtttgggagaaagtgtctttagtaatgaaattagtgattttgcaacttatagaacagggatttccgcaggtggagttaatattccggattcggtgaagacccaaagggaaaggtgttggatactgtcggatattcttcttcgaatggattattttaagacaaatactatgttgtctttccaatagatatgtaatggtacagaattcgatttatggacaatcgtatatagggtatacttggataatgttcgtaattgtcgtttttatagctaataaaagagcaagtttcaatggaaaataaaaacttgctcttcgcgttccatattaattactagtacttttgataattttgatatgacaataactatgtagccaaagttttatatgttttaggtaaaacttcctcttttcttgccgtactttgggagccgcatatttattatttataagcttggcatagtgcattgcttgggtataatctcctatatgtttatattcgctatacagttgatgataatatttatttaaagcatgataatatgattctgtaggtgagagcttaaattttttaatataaaaagaggtaatgtcaatagttgataaaatgaacttttcatttttgattatatctttggaatgacttgctgattcttctagtatccgatatacactagtaacttccgggataaattttattttataatggtaatttatccatagccacataggatagtctcccataagccagttctttttttgcggttctatgtcatctatatattctatcatggcttgtgttcttatgcaagtggttagtgctggtatccggttatatgtaagtaaatcgtaatactcattatattcttctccaaatagatattcttctattttcatcttactttggttatatacttggctaagtgtatagaccattccgtagtcgggattcttttctaaaaaatctacttgtttctgcagtttgagtggatctgtccaataatcatccccttcacataacgctacatattttcctcgaattgcttggtttacaattcgcgctaacgagccatcatgtttagagtattgattttctgtctccaaaatagcatgaatattagaatatttctcggcatattcacgaataatctctgccgttttatccgtagaggcatcatcatgtattattatctcaaatgggaaatttgttttttgcataacaaatccatctagacattggcgaatgtactgttcatgattataggtcaaacatctgatactggcaagtgggagcgtatttctcatttttcttaaagtaaattattgattataattttccattcccattttcccataaagagggtgaaaataaaaatataatctagtaagtgttaatatttagtttcaacaataaaggaaaaattattgtggatacaaaagttggtaatttctgcgggttatattttttagctacatagtgtagtctttattttctccccatagttttttgaatggctgggtttccatatcctttttaaaatccagtagatagtctttccaactgtattggggaatatattgtaattgttttattgtcttgctgatatctaatacaaattgttgggaacttcttttttcaggacaatggataataggtgatggatgttctttaggggagaaaacttctactattccttgaattctttcttttaaagttgaaccaccacttcctgcgttgtaaataccaccgtcaagaggggattccacacatttatctattatttgtaagaaatccttaatacaaatagtctctagtaaccgctcaggatctccccacatttctattggctcccctttaattgcttgttgtatcaaatatcggtctgaaataaggcattttaccccatctgtgtaagtatatgggttagggtgaaacatatatattcgaggaagacgtaaaataaagcgtttgattccatacatatgataataatgctcgattaaatcaactgctgccattttagctatgacgtatattgcatggtcacctgtcattggggccttgcgtatggcatcgggagatataggaattttactcccaaataaatagctgatatcaaatagagattgcggaaatataattttgtgcgcaccacattgccgggtatattccagaacattaagggttcctttggcaatagagtctatatatttatgtggagtgtatccttccatagtggcgggaagtgcaccggcaaagtgcaatactgtattgatacctgattgaggaagccgcctaaattgctccatattttctatgtccaacgagtaatatgggacattatagtctccgaaaaagccattgtctgattttctatgtccaacagcatatacctgatagcctttttgctgcaaatgagtggttatgtgggctccaagcgttcctgttgcgccaaatacaattacttttttattcatatatgttgatttttatttttttaagatacatggattcgctggtctgcttgatatatgatatatccggaacggtcttgcgactttttaagttcctgtaagggacctttatcaatatgatatttgacagcccactctgcatttttattgttttcaataaatgctcttatataagatacttctttactcaaaaaataaactccggaacatttgtgaaaagaccacttggggatattaaactcaccaagtgcgacttctatcatgccttttacataatcatatcctgtgcttagttttactaaatcatatgagataaaatctcctccaccacgagcaccaacttcaatgaaaaaaatatttccattttgatctatcttgaactctgtatgtgaagcgccgttattaattccaatagcgtttaatatattgcaagtcgcatatttaagtttttcctgaatatcgagagaaagagtagaaggttggtggtgagctgtttcgacgaaatagggggccccggttgtttctttatccgtgatagttaaaacgtaatgcttactatggaatgaaatagattcgacagagacctctttgccttctatatattcttcaatcagtatacaattggcaagagaagcttgcgaagccctgtttagtgcttgtgtgagatcttctcttttattgactttggtgactccgttactgcatgaaccgtctataggtttgactattaccggataaaatgagggtaggtatccggattgataaagtgtgtaagtaggttgttggcaagctttttgatgggataccttctcacgcatctgaaacttattgcgtgcatttaatgctacttcataagggattccgtttaaatcaaggagttctgctacatacgctgcagtaggaactgcaatctctaatgcgttggaaataattccatttattttttctttttgacaaattactgcaatctgttctttatcaacaatagatatatcataataatgatctgcatagtttttgcaataggctccttggctccatgcaaaacagtacgtttcaagccccatttcttttgctttcagaaataacggaagatgaggctcacttgctccaagtatagcaatttttttcatcttattcagtaatgatttttacccacgagttgatacacgacatcattttatgttgctgttgttcgttattgaaacttactactaatgttcctatggcgtcatttgccccattaaatgaatgaataaggtcgccaggctgaacccataagtctgtttcgataatatggttttccttcatattctgttctatttggatatccttgaatattcctgtcctgtccgcatgcagaatgatttcagaccaataaccgttgtaaacacaaggagctataggggggattatttccccaacggctgcacgtacggcattttttataagatcggtttctgttgcataacgtagcatttctgataggcgattgccacctccacgaggggaaacttccatgatataggcttttccgtctgttccaactcgtgtttctatattatatattgaagtgttcatatgtaacaattgtagcaatcgttgtatttcagaagataaaaattcccggtttctatcaagcattgaagaaggccaactgtaggcggagggagtataaggattggtagctttattatcaaaatattggtcggaaaaggagatgaattttaattctccatttatcgagaatgcatcggaatccgacgaatatccttgttgttcaataaattcttcaacaataaaacgatgagaaaaggaatttttcaaagcatatgttatagctttttctagatctgtggttttatctattcgggagactcctttactaccagcagaatcaacaggttttacaataataggccattgaaatgattctatgtcggataatgcttcttctatactattataaccacgagatttcggagtattaaatccgttcttttcaaggaagctccggaaaagagctttgttttggaggatttgtacagaggtatatgggttaccgggcaatccaagtttgtcacagacatatgcggcagttaaaactccgggatctactgcaaaagacattatgccgttaatctttaattctttggctaattccaatacagcatttttatctgtgatacttatattgtgatattcatctgcatatttgtgagctacgttatgaggcaggtagtcgcatgtaattacatagtatcctaattcatgagcagcttggataacaggaattaaatacctcagtccacctaacatcaaaatttttttctggttgttagccattgttcattataagttttaatatacgttcaatatcattttcttttaaagcatggtgcatgggcaagcaaataactttattggccatttctgttgcaataggtaaattttcaggtttggctgattctaatccgcgatatgttgaaaatgtactaatgagtggataaaagtagcgccttccccatatgttgtgttccttcatttttatgtagagttcatctcttgtcattccataaatattttcgtttataaaaataggaaagtaagaatagttgtggcggacttttggcatatcttcaaaaaatgtcactcccggaacagttgctagtatctcacgatattggatggcagtttgtcggcgtttagaaattgcctgatctacaattttaagatttagtagtccgaaagcagcgcgtacttcatccattttgctgttgataccgggagctactacttctgtctcattggcaaatccaaaattctttaaatagtcaattcttttttttgtttgttcatcatgcataatgagagctccgccttccaaggtgttaaatactttagtggcgtggaaacttagtgttgacatgttacctgctttcagaatactttctccattaacttctactccaaaagcgtgcgccgcatcataaatgactttaagcccatacttgtcggctatttcttgaattctttttgtattgcatggtttgccgtatacatgtacaggcatgatggctgttgtccggggagttatggctgcttcaattttatcaggatctagattgcaggttgtaggctcgatatcaacgaatacaggtttgattccattccaccaaagagcatgtgtggtggcaacaaaactgaaaggggttgtaatgacttcgcctgttatacgcattgcttgtagagcggtaattaaaggtaatgtgccattggtaaataaagacagatagggtacctttaaataagtagcaagctctttttctaattttttgtggaaagagccgttgtttgtcaaaattgcactttcccagatttcttttaaagaggatgaaaaatcatctaaagaaggtaacaagggagaagttacatatatagggggctctgtcattgtgttatagtatttaatattggatattatattttcgcaaatatagtcagattattgtatttatcaaaatgtattttttaattaatatatctattcccttttttgaaataagacatatataagttgaataaatagttgttgaaaaattaggcgtacattggatgttggctgactttgcaaaagaatataaaaaactggatttatcaccagtatctaaaaactgggagaggaacgcccggggctgcagtacaaaagtactataattatgggatacaacaaaatattctttgaaaaagttttttctaacaaaaggatggaacgatatttcaagctttatccacaagatgaagctagagctatattgcactaccaatgtaatttatgtttggctgagtccttttatgttagcttatctgtgtttgaggtaactttacgcaatgctttgggccgtgaactcgaaatgatgacagggcggcaggattggtacgctatattcccgaatacacccggattgaccaatttgaacagatatattacccaagccaataaacagattgcaggtcgacacgaaagtgctacaccttcaaaaataatagcggaattgaccttaggattttgggtgtcgcttctgaatagtgagtatgaaagaatattgtggaaagacttgcgaagagctttttccgtttatgctcaaaaagcagaggcagcgtaagaatgtatctgcaccactgaacaccttttgaatttttcgcaaccaagtatttcataatgaatcaatttgctggaacttacagcgggtagaggaaatacatcaagaaatgctcaccgtaatggggtggataaacaaagatgttcctatatggatgcaacaagttgaccgttttcaagaggtatgcaaaggaatacgggatacgatgggatggaggtaaacatacatagagaatgagtggcttgtttataatatcctgacaataaaatattgtcaggatattagacataaataggagcatttactgaatatccctaaacagattgaagttactatttcctgagtcgtcctcgtcgttttggcaaaagtttgcttatttctacgcttgaaacctactttcaaggaaagcgggaactctttgaaggctgattcatactagatgcattttgattcttcatctctcatatctctcataaattaacataatcctttaatttacaacaaactatattatgagagatgcagaaatctaaagtatctctcatacttttctcctgcatctctcatagatttccgatttatctctcataatatcctgtagccggaacgtagatgggctgtgtcggttttccgatatttttcaacttgccttccgctttcaaccgacggagttgccgtgccgccatgctttgggtgaattcacaaagcgattgtattctggagcgtgtcaaggcgacattggttacaaaatattccgtcaatttattatctatttcttcttgggaaagggaagcggagtgtggtttgtattttgagcgtcgcacatgagtagctatacatgaacttcttagatctctatcggcttggaagcgaatggacttaaatttcactttatcagcacgtgtgccgagcgaatgtaccggttcggttgtttgcaaagtgatttgaaaataaccgattccgtccaaatgtactctttctccttcgcggagatgatttcccatgcatctgctcaattccattaacatagcttctacttctgattttccgaaagtagttgcctgatgaatttccattgccaacctttgagaagtgacatgctgaaaattaaccactcttgggtggtaacttggttcttccccttctttttccggttggggattcttgtaaaactcgaattgtattgccatttctgttttgatttaatggtgatttatatgtcaggctacttatgttgttggcatatcttgcctttgttttcggataattctacggcattataatcgttccactctagtgaatggttctgtgcactattgtgaacggtactgttcactagagtagacggatctgaacactggagtggaacggttgcaatgcttcatcaaagatacgacatttggagctggaaaacaagagattagtcagctgttttcatatgaaatactgtaagctgttttgtggaatacagcttgttgggagaaggaggggggaggaagtatgagagatatgagagatggggtacgagatttcttgttactatactgtcggaacggtattcgaggtgtcgagacgatacatttgcttctgtgaaatatttgcagtacatttgtgtctgtaaacaacagccctacaccacacatgcaggacaaataaataaaataatgagaataacacaggtgagagacgatggcaaggtgaatacactgcgtacgttgagaattgagcagctcgtggagctgatgaaagtggaaaccaaagcacagcccgtctcaaaaatgagagaagtcctgccctatatgcttcccggtgataaaaacgactatgttcagaaagtgccgaaactgcttcctgctgccgcctttgtccgtaaaaacggggtgatggttatggcggaatacaatggaatcgtaatgattcaggtgaataatctgtcggggcctatggaggccgatgaggtgaagaagtgggtgaaagaactcccgcaaacgtatctggcatttgtcggttcttccgggaagtctgtcaagatctgggtacgttttacttatcctgacgatcttttgccggttacccgtgaacaagcggaattatttcatgcgcacgcttatcggctggcggtgaagttctaccaacctcaattcccttttcatattgaactgaaagagccttcgttggaacagtattgtcgcctgactttcgatccggagctgtatttcaatcccgaatcaatgccgatttacatgaagcagcctgtatctatgcccggcgaaacgacttatcgtgaacaggtacagacggaggcttcccctttacaacggcttgcgcccggatatgaaagtcatgaagcgctttccgttctgttcgaagcggcttttgcgcgggcgctggaggaacaggaggaatttcagccggacggagatatacattcgttgctggttgcccttgcgggacattgtttccgtgcaggtattcccgaagaggatacggtacggtggtcgcgcgctcattatcacttgccgaaagatgattttctgattcgggagacggtgaagaatgtctatcgttccggacgtgggtttgccgataaaagcagtctgcttcccgaacagatatttgttatgcagatggatgaatttatgaaacgccgctatgagtttcgtttcaaccagttaactacacaggtggaatgtcgggagcggaatacctttaatttctattttcatccggtggacaaacggcagatggcaagcattacgatgaatgcgcagtacgaggggcttaagctttgggacaaggatgtggtgcgttatctgaattccgatcatgttcctgtgtatcaaccagctgaagaatttctttatgaccttccccattgggatgggaaggatcatattggagatctggcaaaacgggtgccttgcgacaatcctcattggccgcatttgtttcgccgttggtttctcagcatggtggcgcattggcgtggaatgatgaggaagaattatgcgaatagcacttcaccgatattggttggtccgcaggcatacaggaaatctacgttctgtcgcttgattctgccaccgtgtctgcaagcttattacacggatagcattgatttcagccggaagcgggatgcggaactgtacctgaatcgtttcctgttgattaatatggatgaattcgaccagatcagcattgctcaacagcctttcctaaagcatattctgcaaaaaccggttgtgaatacaaggcgtcccaatgcttcggcggtggaggaacttcggcgctatgcttcttttatcggtacgagtaatcataaggacttgttgacggacacttccggcagccgccgctatatcgctgtcgaggtgacgggagtgatagatgttgtccgtcctattgattacgaacagctttacgcgcaagcgatggcggcattatataagaatgaacggtattggtttgacgagcgggatgaggccatcatgacggaggccaatcaggaatttgagcagtcgcccgctattgaacagttgtttcaagtgtattatcgggcggcaggaaaggaggaagaaggcgaatggttgcttgctgcggatatattgcaacgtatacagaaagccgccaaaatgaaattctccttcggacaagccacccatttcgggcgtatcctgcgacggttgggagtagagtcgttcaggaaaacacatggggtgtattatcatgtggtggctttggagtgatatgattgtttaatatgtgcatttttgttttatttctttttatgtagggaatggactttattattttataataattatctttgcacgatcttccattataagtggatatcaaatagaaagctaattgacaatgatattattaagttttgacacagaggagtttgatgtaccccgtgaacatggagtggactttccgttggataaggcaatggaagtatcggtttatggtacgaacaagatactggactgtctgaaaaagaatggggtgcgggctacttttttctgtacaagcaactttgcggagaatgctccggaggtgatgcaccgtattatggatgaagggcatgaagtggcggctcatgggtgtgaccattggcagcctcaggcttcggatgtcagtcgttccaaagagatactcgaacggttgacggggaggaagatagaggggtatcgccagccgcgtatgtttccggtgtccgatgaagaaatagagcggatgggatatctgtataattcttcattgaatccggcgtttattcccggcagatatatgcatctttctgagccgcgtacttgctttatgacgggtaaagttcttcaaattcctgcgtcggtgactccgtggatacgttttccgctattctggttgtcttgccataatcttccggtgaagttgtaccaatggatggcaaacagggtgctgaagcacgacggctattttgtgacctatttccacccgtgggagttttatccattgaatgaacatcccgaatttaaaatgccgtttattatccgtaatcattccggcaaagggatggaagaacggctggatctgctgatccgtaatttcaaggagaagagagccgattttctgacgtactcggaatttgcgaaaatgaaacggacagaactaactaaatagaacgagaaatgattaaattggcaattgtgtctccctgctataatgaggaagaagtgttggaacagtcagccgcctgtttgacagccttgtttgatgagctggttgggaaggaaaagatcagtgcggacagcttcgtgctttttgtaaatgatggtagcaaggaccgtacgtggaacattatcaagaagctgcataaggaaaatccttacgtgaaaggaatgaatctggcgcggaacgtaggtcaccagagtgctatcatggcagggatgatgactgccaaagactggagtgacgctgttgttaccattgatgcggatttgcaggatgacttgaatgcgatagaggaaatgattgatgcttatacagccggttacgatgtggtgtacggagtgaaggtctcccgccaggccgacccgttgttgaaacgtctttccgctacggctttctacaaactgcaacgcaggatgggagtggaatccatttataaccatgccgatttccgctttctgagccggagggtactggaacagttgtcacattatcaagagcgtaatctatacctgcgcggcattattcctctgctgggctttccttccactacggtggacgatgtgattcgggaacgcacagccggaagctctaaatatactctgcggaaaatgctgggactggctctcgacggaataacctcattctcggtgaagccgatttatggcattgtctatttgggtattatctttgtctttatcagcattctgatcggtttttatgtcctttattcgttgattgcgggaacggcggaacatggctgggcctctctgatgttgtccgtatggtttgtaggcggtgtcgtcctgatgtcaatcggtgcggtagggctgtacatcggaaagatatataaagaggtgaaacatcgtccgctttataatgtagaagaggtgttatgcgatgaggataaacaaagtcattaaagagacatgggaacaacacccggactggcaggagaaattctggcagtttatgcgttttggcatcgtcggtacgatatcttcggcgattcactatggcgtatattgtctggtactgttggtggccaatccgacgctttcttttacggcaggttatgcggtcggatttgtctgtaactattttctaactacattctttacattccgttccaagccttcatcgcgcaacgctgtcgggtttggctttagtcatttacttaattatctgcttgaggtaggtttgctgaaccttttcctgtggatcggattcggcgagtttctcgctcctatattggtgcttatcgtagtcgttcccatcaatttcctgattcttcatttcgtatatacttataaaaataaacagtaggtctgctttcagaactattcataaaaagaaaaagctattatgaaacgttttctaaatcttattgtatatatactttccgtgcatctttccgcactgataatcaccggattgtttagaggggtattgttcatttcttcttaccatcaactgactgccgaagcactgtctgataaaagtctgtcattgatagcatttatacatggagtatggttcgataacgtgataggttgttacatattactgcttccgctgacggtagctgtagcctgtgggctttgcaactgttatgggagggctttattccgtttcttcactatcttcttcggtgtcttttatgggttggtttatctgatcagtgcggctgatattccttatttcgcctactttttcaagcatatcaattcttccattttcgaatggttcggttatgcgggtactactgcggggatgatattgggagagacttcctattatttgtccattgccttattcctgctctttctgattggctttgttgtgtggattgcctttcttggccggtatttccgtcaccgttgcctgtctgctcccggttcattcccttgcttgcaacgaagtgttgcgggtttggtagggcttggcttgatcgggctttgtgtatttggcattaggggacgtacaggctataatccgatcaaggtaagtgccgcctatttctgtcaggatgcctttttgaatcagttgggggtcagtccgacctttaatttgttgacgagcgtgctggacgaccgacggccggaaaacagatatctgcatctgatggatgaacaggaagcgctggaaaaagtaaaagctttgttagcacggccgggtgaaccggatgtctctccgttggcggtttatcggcataattcacaggatagcgtatcgcgacgccgtcccaatgtggtattgattatgatggagtcgatgtcgtccaatttcatgaaacgtttcgggcagtcacagaatctgactccttttttggatagcctgtatgcctgttcccttagtttccccaacttttattcggcggggattcataccaatcatggtttgtacgctactttatattcttttcctgctatgatgaaacggaacttgatgaaaggttcggtgattccccattattcgggattgcctacggtattgaaggagaatggatatcataatctgttttttatgacacatgaagggcagtacgataatatgaatgcctttttcaggacgaacggttttgatgaggtctttgctcaggaagattatccgtcagagaaggttgtgaatagttttggagtacaggatgatttcttatacgactatgctattccggttttgaatcggacggcagacgaagggcaaccgtttttcgccaccttattgtcaatcagcaatcatccgccttatgtaatacctccttatttccatccccgaacggacaaaccggaaactcagattgtggaatatgcggactgggctttgcgtaaatttttcgaagaagcgcgcaaacagtcgtggtttgagaatacgatattcgtgttggagggagatcatggcaaattggttggggatgcggagtgtgaacttccgcaatcgtataatcatatcccgttgatgatttattccagcagtataactccagcggaacatatggcttttggtggacaaatagacatacagcctacggtattgggactgttgggtattgattatttgcagaataatttcggagtggacttgttgaaagaagaacgtccgtgtatgttttatacagccgataatatgattgtaggccgtaatgcgactcagttgtatatgtacaattatgagacgaatcaggaatttgcctatcataccgataatgggaagctggttcacgtcccgatggatgatagttttctgcccttgaaagaatatagtttttccatgctccagtcagcggaatatctggtgaagcatggaaaaacagtgaattcatccgagactactttttgatgaatttgtatatctcggcagtctggcgaagaacgggtttgggtgattgatagatccgttcgaactggtagccttccttttcgaactcgggaagattccgttccgcatcctgcattcctattagcaggaacccttccgaaggacggtctttgtagaaatttccgatccggtttcccaggtagaagttgatttcaaaatagtgtacagggtcacctatggagcgtacaccggcctcgataaattcgtaaagcgtgcctgcgcttgccggtactacccggtctatctccgcagcaacggattttaccgattttgaattgagaataggtggctggtaagctccgtccagtgcgatatacattcccatagtcagtgcaacgatggcatagaggaatcggttgctgagtgtatatttgcgttgatagaaccaccagcagatgccaagcaatgtaggaatggcaattaatatgaaagagccgattccgttaatgttctgtatggcatgcaggaaattgatgttgttctgcgcatgacggccttgaaagattgtttccgggataagaccgcatttcacggcaatgaaacaggcaaacaatagtaaactcagtacggcgaggatactaccgtatacttttatcactttagagcgtttcttcaccagatagaataaatattttgccaggaagtatgcgatgaaaggataaataggcattaggtatacgctacgtttactttgcggtatgcaatagaatatgaatgtggcaactatgctggtaagagcgaacaaatccaccggatccatattcttgatccatgcggtaaagcgtttccaccaggcagccggctggatactgaatttatgataggtgaaactgaaaagagaaagcagtgccaataacgtccaaggtacataaccggcaaacagggttacgaagttgtaatgccagggattcacgcaggagtcgtaactcattgtgttggtcatacgtccgaagttctcttccatgactaatgcaaggaattcttctcccccttgttggtaagcggctatgtaccaacagaacggcaagatgagtgaaaggatggcccatgcggaaaggagaaggaaagccctgaagaagtttactcctctgagcagaaggaatacacctgtaaccagacaggggatgatagtgcctaccggacctttggtcaacgttcccaaactcataagaaggatagccagccagggaatgcctttaagccctttctcgtaccatctgtaaaaacaatataacgcacagacggtgagggctgtcagcaccatatccacccggcagttggctccggcacgatgcaactcgaagttggtcaaggtgatgaatgcggtgagcagcgccacttccgttccttttcttttggcgaagaaaagaaagccgaaaagagtcatggagattagcgcgatggccgatggcaaacgggaagtcatctccgtaacctgaccaccgttcaatgttgaaacggctgcaatagtccaatggaagaaaggtggtttgtagggtatctctcctccattatttctcggcaaaatccagttgtcgctttccaacatagaataggatacaatcgattcgcggggctcgcctttggtgtgatactccggcagcccgagaaaaggaaggatcgttactacgcaaatgactaatagtagccagaaagctttgttagaagtcaatgttttcatatttatttgttttgaattttatatcatatttattttcttccgaagtccgccgggatttctccccattctttcgtttcccatttgaggatacgggtagtgtaggtattcgtgctcagccacctttccgcccgttctatcaattgaaatagtgcttctgtttcctcatttcgggggagtttggtcttgcacttcttttgtcgtacccaactgatggcattgacactgtcgctataaatgggcatatcgaatcctttctgtttcaatagcgccagtccgtgcacgatagctaaaaattctccgatattattcgttcctttcatcggaccgaaatggaagatctcttgtcggctggctatgtgtacaccgcgatactccatagggccgggatttccactgcaagccgcgtctaccgccaggctattgtctatcacggaaggaggcaacaggtcggaggatatcttttcatttttcttttttgcgttttttcctatataagcgtatggtgaggctgagagtgcgcgttcggcttcttcgcgggtgtcgaaagatttatatttggcgccttcataccctttgatttggagctggcaatccgtccaggaggtataaactccgggagtgacgccttcccatactacgtagaatttctgtttagccataaaagataatggtttattcggctgcgaaggtacgaatatattctctaactgaacaagttagtagagttacttgttataaaaaaaagagagtttaagaaatatcatatataagaaaggatatattatggaaagatcttttagtgaagcattaaaacatcgtcggacttactattcaattactaatcagtcacctatatccgatcaggaaatcgagtgtatcgtgagtacggttgttcgtcacgtgccttcggcatttaattctcagtccacacgcgtggtgttactgctgggtgagtctcacaagaaattgtggaaaatcgtgaaagacgctttgaagaagattgtgccggcagacgcctttgtgaaaacagaggagaagatagaccactcatttgcctgtggatatggaactgtgttgttctttgaagatcagaaagtagtcaaagggcttcaggaagcttttccctcctatcaggaaaactttccgggatggtcgctgcaaacttccgccatgcaccaactggctatgtggacaatgctggaagatgtgggcttcggagcgtcattgcaacattataacccgttgattgacgaggaagtgcgtcggacatggaacttgccggagcattggcacttgattgccgaaatgccgttcgggcttcctgccgaaaaaccgggagaaaaagaattccaaccactcgaagaaagagtgaaaatctttaaataatgaaataaatgactaattttgcaggtaaaattagtcatttatgattcgtatcttccttaccggctatatgggcgccggaaaaacgacattgggcaaggcttttgcccgcaagatgaatataccgttcattgatctggattggtatatcgaagagcgtttccacaaaacggtgggagagttattcacagaacggggtgaggccggattcagggagctggagaggaatatgcttcatgaggtagccgagttcgagaatgtggtaatctctacgggtgggggagcgccttgtttttttgataatatggagtttatgaatcgggcaggtaagacggtttttctggatgtgcatcccgatgtgctgttcagacgcttgcgtgtggccaagcagcagcgtcccatccttcagggaaaagaagatgacgagttgaaaacttttatcatacaggcacttgaaaaacgcgcgcctttttatcatcaggcacattatatctttaatgcggacgaattggaagaccgatcgcagattgaaacatcggtgcaacgtttgcaacaacttctcggattataacataattgaacgaattaataagcaattaattggcaagatgtagataaatctgtatttttgccctccaattatttactaaaaatactgaattacagaaaaatgagaaagtggcgtattgaagattctgaggaactctacaacatcacaggttgggggacctcctactttggtattaatgacaaaggacatgtcgttgttacaccgcgtaaagacggagtgactgtcgatctgaaagaattggttgacgagttgcagttgcgggatgtggcagcccctatgctggtacgtttcccggatattctggacaaccgtattgaaaagatgtcgtcttgtttcaaacaggcggctgaggaatacgggtataaagcgcagaactttattatctatccgatcaaggtcaaccagatgcgccctgtagtggaggaaattatcagtcacggaaagaagttcaatcttggactggaagccggttccaagcctgagctccatgcggtgattgccgtcaatacggattccgactcattgattgtctgcaatggttataaagacgaaagttatatagaactggctttgcttgcccagaaaatgggtaaacgtatcttcctcgttgtggagaagatgaacgagctgaagctgatagcgaagatggcaaaacagctgaatgtggaacccaacatcggtatccgtatcaaactcgcttcttccggtagcggaaagtgggaagagtcgggaggagatgccagcaagttcggcttgacttccagtgagttgctcgaagcactcgattttctggaaagtaagggcatgaaggattgtctgaagttgattcatttccatatcggaagtcaggtgacgaagatccgccgcatcaagaccgccttgcgcgaggcttcacagttctatgtgcaacttcattcgatgggattcaaggtcgagttcgtcgatatcggtggcggattgggagtcgattatgacggaacacgttcatccagcagtgaggggagtgtcaattattcgatccaggaatatgtgaacgactcgatttccactttggtggacgtgagtgacaaaaacggtatcccgcatccgaacatcataacagagagtggccgtgccttgacggcgcatcattcggtacttatttttgaggtgctcgaaacggctaccttgcccgaatgggacgatgaagaggagattgctccggatgcacatgaactggtgcaggaattgtatgccatttgggatacactgaaccagaataagatgttggaggcttggcatgatgcgcagcagatcagggaagaggcgttggatttgtttagtcatggaatcgtggacttgaagacccgtgcgcagatcgagcgtctgtactggtcgatcactcgtgagatcaatcagattgccggtggtttgaaacatgcgcctgatgaattccggggattgtctaagctgctggcggataaatacttctgtaacttctcattgttccagtcactgccggactcttgggcgattgaccagatattcccgattatgcctatacagcggttggatgaaaagcccgaacgttcggctactttgcaggatataacctgtgactcggacggtaagattgccaactttatttctacgcgtaatgtagctcattatctgcctgtacatgctttgaagaaaacggagccttattatgtcgctgttttcctggtgggggcttatcaggagattttgggagatatgcataatttgttcggtgacacgaatgccgtacacgtttcggtgaatgagaagggatacagtatcgaacagattattgatggagaaacggtagcggaagtattggactatgtgcaatacagtccgaagaaactggtacgtacactcgaaacttgggtgacgaaatcggtgaaagagggtaagatctctttggaagagggaaaagaatttctttccaactaccgttcgggactttatggatatacgtatttggaataataatgagagaaaaactaacagtaattaaggtgggtggcaaaatcgtagaagaggaagccacccttcgtcagttgttaaatgactttgctgccattgaaggacacaaagtgctggttcacggcggcggtcggtcggctacaaagattgccgcacaagtgggcattgaaagcaaaatggtgaatggtcgccgtattactgatgtggagacattgaaagtggtaactatggtgtatggcggtttggtcaataagagtattgttgccggactgcaggcgcgtggagtgaatgcactcggattgaccggggcggatatgaatgtgatccggtcggtgaaacgtccggtcaaggatgtggattacggatttgttggggatgtggaaaaggtggatgcaactttactgtcggatttgatacacaaaggagttgttccggtgatggctccgttgacacatgacggacagggaaatatgctgaataccaatgcggatacgattgccggagagacggctaaggctttgtcggcactgtttgatgtgacgttggtgtattgtttcgaaaagaaaggagtgctgcgtgacgagaacgatgacgatagtgtgattccgcagattacccgtgtcgaattcgaacaatacgtagccgacggcgttattcaaggcggtatgattccgaagttggaaaactcttttgaagcaataaatgcgggggtgtcggaagtgataatcaccttagcgtcagcgattaacgacaatggaggaacaaaaataaaaaaataattcaaaaaaagtagtgggcgcctgtaacttttcgtatcctagcccgtcattattatagagatgcaagaaatcagcttccgaaacgatattttgccgttgaaagataaactctttcgattggctctcagaattactctggatagagctgaagccgaggatgtcgttcaggataccatgataagagtgtggaacaagcgtgatgagtggtcgcaattcgaatcggtcgaagcctattgcctgattgtggcaaagaatctggcgatagaccggagtcagaagaaagaagctcagaatgtggaactcactccggaaatggaggaggagcctgatgccaatagtccgtatgaccggatggttcatgatgaaaaaatgaggatcattaacaggctggtcgacgaacttcccgaaaaacagcggcttatcatgcaactgagggacattgaaggtgaaagctataaaaaaattgcagcccttctgaatctgaccgaagaacaggtaaaagtaaatctgttcagagccagacaaaaggtgaaacaaaggtatttagaaattgacgaatatggattataaagatatagaacagctcctcgagcgatactggcaatgcgaaacttccgttgaggaggaagcaacattgcgcgacttcttcgcaaaggaagaagttccggctcatctgctccgttataagaacttgttcgtttatcaacaggttcagcaagaggtagggctgggcgaagactttgacgcgcgtattctggcagaggtagagccggtggtggtaaaagcaaaacgcttgacgctggtcggtcgcttcgttcctctcttcaaggcggctgccgtaattgcaatcatcctttctttggggaatgtggcacaacattctttctccggagatgacggaagtgtattggcggcagataccattggtaagcaggtaaccgcaccgtcggtcgcaatctcgaatgacgtgaaagcggatcaggcactcgttgacagtttggcgaggattgatcataaggcgcacgttatgaacgaatagacattttcatttgctttaaacatataatatagttagtgtgcttaattaaaacaacaacgaaggcgaaactgtgaagttttcaattctctcaattttttagattaaaactaactaaataaatgggctaccgcgtgatgcagtagcccttttatgcttttaaacggtctttatttaaactgtctttatttgatctgccgtatattttttcttggagcatccacttcttgaggatctcctttataggcaatatcaccgcttcctttgacgcgggcaaccagcttctgactggcatagcaactgatgttgccggagccgctaatgcttgcgtctgtgttttctgcctgcaaatcggcggcctgaatatttcctgatccggcaatagaatagctcgcttgaatggctttgccgttcagattgatattgcccgaaccggaaatacttgcttgacattcctgactctctatttgttgtagtcttacatctcccgagccattaattgaaacggccattttttggcaattgaatccttctccctgaatgttgcccgaaccgttgatgtggaattcaatatctttagaggtttgtatcccattgattaatcttatatttcctgaaccgttgaccgacagtttattcagctccggagcaaaaacttttatttccagttttcctttccagatagtgacattcttcttgaattttataatgaatgtactaccctccacatacgtttctataagtggtatgatgttgtcggaaccatgaatttcgacatggctgcatgtgtcttgccaataactgatgttggcacttcccactagtttgatttcattgaagtggtcggctttcacttctttgaagatgtaattcttgctgcctacgatgtgttttccctgcaagcaagagccggcagtaagtactagaaacattcccgtgactaatacgagcaataaacttgttttcataattacgcttttttatgattgatataatggttagacggaagaatttgatctaaagttgcatcttccataaagtttttcgttagcgtcttcttttttattacttttgtggctgttgataggaggattataatggataagattatagaagatgatgagttagggcgtttggtgatacgcgtcaattcacgtgcgaaaagtcttgtgtttcgtaccaagagtgatgctgtttatgtttcagttcctcctggtaccaccctgaaagaagtgaaactggccatagagaatttgcgtggaaaacttttggcctcccggcaaaaaatcgctcgtccgttgattgatttgaattataagattgatgcggagcattttaaactatccttggtatccggcgagaaagatcagtttctggctaattcccggttgggtgtcatggagatcgtttgtccgcctcatgccgattttgcagatgagaaactacaaagctggttgcataaggttattgaagaatcgttgaggcgaaatgcaaaaagtattctgccttcacgtttgaccttcttgtccaagcaatgcggattgccctattcgagtgtgaaaataaactctagtcagggcagatgggggagttgttcggctcgaaaagctattaatttatcctattacctggttttgctgccttctcatttgatagactatgtgttgttgcacgaattatgccatacccgcgagatgaatcatagcgaacgattctgggcattgctcaatcaatttacagaaggaaaagcattggccttgcggggagaattgagaaagtaccgtacggaaatataaaatgctttacagccaagatagtgctatcgcattgtcacgaacttagtttattctatcttgggtaaagccttgtaagctcctatttctggctgtcttctaaatcttatacattcctgatgatggttcgttatgatacgtaatagggggatatgtctttattatttggctaattgtttaatcccgtccgattctttttcaaactgataagcccctcctttttcgctaagatcaaatgtggagactaattctgtgttattatctacgatcaataaagcgctttgttctgcaaaacgtcctacttctaccgtgtaaggctcttccgatatggttttattggagataagactgtcgttgacgaacaaagaaatcgaatctccggcaaaaccttttaccagactgatcgtgtagctttcgatgaaatgacgttcttcctgcttttcccgttgtagccgcatactcatgtatacgaaaataaccacgacaaagatgacggcaaaagccagaattccgttgcctaccatgaactgtttattggtgtttagatgatgtgccatagtgcttatttttttaattgcggtgtaaagatacaaagataaggctgttaattcatactttttttctttaatgttttgtagtcgaacagattatttatatctttgcaaccgaaaacggatgaaaggtggaggggcgattaagctcctttttttgttcttatatagttaataaatgatagaaaagaaaactgtttgtcagattgtagaagagtggctggaaggaaaagactactttctagtagaagtgaccgtaagcccggatgacaagatcgtggttgagatagaccatgcagaaggtgtttggattgaagattgtgtggagcttagccgctacatagagtcgaaactgaaccgtgaagaggaggattatgaactggaagtgggttcggccggtatcggacagccctttaaggtgctgcaacagtattacatccacatcggacaggaagtggaagtgatgactaagggtggacagaaactgaccggtgttctgaaacatgcagatgaagagaaatttacagtgtctgtgcagaagaaagtgaaaatggaaggtgctaagcgtccgaaactggtggaagaggacgaaaccttcacttacgagcaaataaaatatactaaatacttaattagctttaaatagttatggccaaaaaagaagaaacaatcagcttgattgatacattttcggaatttaaggaactgaaaaatatcgatagaacgacgatggttagcgtactggaagagtcgtttcgtagtgttatcgcgaaaatgtttggcaccgatgagaattacgacgtgatcgtgaacccggacaaaggggacttcgagatatggcgtaaccgtgaagttgtggccgatgaagacctgacgaacccgaatatgcagatctcattgagtgaagcgcagaaaatcgacgcttcctatgaggtgggtgaagaggtgactgacgaagtgatctttgccaaattcggtcgtcgtgctatcctgaatctccgccagacattggcttccaagattctggaattggaaaaagacagtatttataataaatatatagataaggtaggtacaatcatcaatgcagaagtttatcaaatctggaaaaaggaaatgttgcttctggacgatgaaggaaacgagttgctgttgccgaagacggagcaaattccaagcgatttctatcgtaaaggtgaaacggcccgtgcggtggttgcccgcgtggataacaagaataataatcctaagattatcttgtcacgtacttctcccgttttcctgcaacgtctgttcgagatggaagtacccgaaattaatgatggtttgattaccatcaagaagattgcccgtatccctggcgaacgtgccaagatcgcggtagaatcttacgatgacagaatcgaccccgtaggagcctgcgtaggtgtaaagggaagtcgtattcatggcattgttcgtgaacttcgcaatgagaacatcgacgtaattaattacacatcgaacatctcattgtttatacagcgcgctttaagtccggctaagatttcttctatccgtctgaatgaggaagagaagaaagcggaggttttcctcaaaccggaagaagtttcgctggctatcggtaaaggcggtttgaatatcaaactggccagtatgttaactgagtacactatcgacgtgttccgtgagttggatgagagtgtagctgatgaggatatctatcttgacgagttcagagacgaaatcgacggatgggtgatcgacgctatcaaagctatcggcatcgatacggcgaaggctgtgttgaatgctcctcgtgagatgttgattgaaaagacggacttggaagaagagacggtggacgaggtaatacgcattttgaaatcggagtttgaagaaagtgagaattgaaaattgagagttgagagttgggagtgaaagaaatccatactcattccactctcaactctcaattctccactctcaacttcttaaagctccatttattcattaaatttaaaatatgacgataaggttaaacaaagttacaagagatttgaacgtaggaatcgcgacggtagttgagttcctgcaaaagaaggggtataccgttgaggctaatcctaatacaaaaattagcgaggagcaatacgctatactcgtaaaagagtttagtacagataagaaccttagacttgagtcggagcgtttcattcaggaacgtcagaataaggatcgtaataaggcgtcggtttcgattgaaggctttgaaaagcaaccggaaaaaccgaagtcggaagatgtgatcaaaacagtcgtaccggaggatgcacgcccgaagtttaaacctgtcgggaaaattgacttggataaattgaacggtcgtagaactgagaaagaaccggaacagaagaaagaaactgttgaagaacgtccagtagctcaaccggaagtgaggaaggaacctgaggtgaaggtagaagaggtggtagcacctgttcaggcggaacctgtggctaaacaagttgaaccggtcaaacagacagagccggtgaagcaaccggaggctgtaaaaccggaaccggtgaaagagccggaacctatagtggaaaagcaaccggcagaagttgaaaaagtagtggaggaagtgattaaagaagaaccgaaggtagaagttgcacctgtgaaggcggaagaacataacagcatggaacaacctgtgaaagctgtatcggcggaagtagccccggaggcaacggtagaagtagagaaagaaacttctaaagaagaagagatattcaaaatccgtcaaccggaattgggtgcgaaaatcaatgtaatcggtcagattgacttggctgcattgaaccagtctacccgtcctaagaaaaaatcgaaggaagagaaacgccgtgaacgtgaagagaaagagaaaatccgtcaggatcagaagaagttgatgaaagaagctatcatcaaagagattcgcaaggatgactcgaaactgcagaagggtggagtgaaagataatgttgacgcagccggaaacaagaaaaaacggaaccgtatcaacaaagagaaggtggacgtgaacaacgtggctacttcgggctttgctgctccgagaccgaatgtgcaaggcaaaggcggtaacaatggtggcaacaaccagggtggcaataataaccgtaaaaataataataaggatcgcttcaagaaaccggttatcaaacaggaggtaagcgaggaagatgtagcaaagcaggtaaaagaaactcttgctcgtctgacaaccaaaggtaagaataagacttccaaatatcgtaaagagaaacgcgagatggcttccaaccgtatgcaggaattggaagatcaagaaatggcggacagcaaggtattgaagctgactgaattcgttacggctaatgaactggcaacgatgatggatgtttctgtcaaccaggtaatcgccacttgtatgagtatcggtatcatggtttccatcaatcagcgtctggatgctgaaacaatcaatctggtggctgaagaattcggattcaagaccgaatatgtaagtgcggaagttgctcaggctattgtggaagaggaagacgctccggaagatctggaaccgcgcgctccgattgttacggtgatgggacatgttgaccacggtaagacttcattgcttgactatatccgtaaggcgaatgtgattgccggtgaggccggaggtatcacacagcatatcggtgcatataatgtgaagttggaggacggacgccgtatcacattcctcgatactccgggtcatgaggcgtttaccgctatgcgtgcccgtggtgcgaaagtaacggatatcgccattattattgtagctgccgatgataacgtcatgccgcaaacaaaggaagcaatcaaccatgcgatggcggcaggtgtgcctattgtctttgccattaataaggttgataagccgacggcaaatccggataagattaaggaagaactggctgccatgaactatcttgttgaagaatggggtggtaaatatcagtcacaagatatctctgccaagaaaggtataggtgtggaagatttgttggaaaaggtattgctggaagcggaaatgcttgatctgaaagcgaatccgaaccgtaatgctacgggttccatcatcgaatcttcattggacaagggacgtggatatgtagctactgtgttggtatctaacggtactttgaaagtgggtgacatcgtattggcaggaacaagctacggacgtgtgaaggcaatgttcaacgaacgtaatcagcgtattaaggaagcaggacctgccgaaccggcattgattctgggattgaatggcgctcctgctgcaggtgacacattccacgtggtagaaagcgatcaggaagcccgtgaaattaccaacaaacgtgagcagttggctcgcgaacagggcttgcgtacgcagaaaatccttacattggatgagctgggtcgtcgtatcgctttgggtaacttccaggaattgaatatcattgtgaagggtgacgtggacggttctgtcgaagcattgagcgactccttgattaagttgtctaccgaacagatccaggttaatgtaatccataagggtgtgggagcaatctccgagtcggatgtttctctggctgccgcttcagatgcgattatcgtcggattccaggtacgtccttcgggtgctgccgctaagatggcggaacaggaaggtgtcgatatccgcaaatactctgtcatctatgatgcaatcgaggaggtgaaagccgctatggaaggtatgttggcaccggaactgaaagaacaggtgacagctacgatcgaagtgcgtgaagtattcaacatcacgaaggtgggacttgtagccggtgcgatggtgaagaccggaaaggtgaaacgcagcgacaaggctcgtttgattcgcgatggtatcgttatctttaccggaaacatcaacgccttgaaacgcttcaaggacgatgtgaaggaagtgggtacaaacttcgagtgtggtatcagtctggtgaattgcaatgacatgaaggtgggcgatatgatcgagacattcgaggaaatagaagtgaaacagacattataaactgtactgtattgagaataaacggaggcacagagtgaattataactccgtgcctcttttttctttatagaaaggaatatgacaacgattgatataataatccttatagtagtgggtgcaggggcgattgtaggctttataaagggctttatccgtcagttggcctctatcttgggattgatagtcggtttgctggcggcaaaggctttgtatgcttctttggcggagaagctctgtccggcagtgacagattcgatgaccgttgcgcaggtattggctttcataatgatatggattgccgttccgttgatttttgtgctgattgcctccttgctgacaaaagcgatgaaagccatttcgctgaactggttgaaccgttggctgggaagcgggttgggagcgcttaaatttctgttattgacaagtgtggtgattggagcgatagagtttgtggatggcgataataagttaattagtgcaacaaaaaaggaagaatccttgttatattatccgatggagacgtttgcgggaatttttttccctgctgcaaagaatatgactcaacaatatatattagagaataaagatgcaacaagaagaacccaataaatatgtaaaggaactgacgcaggagaagtataaatatggcttcaccacggaagtgcataccgatgtcattgagcgtggactcaatgaggatgtgattcgtttgatttcatcgaaaaagaacgaaccggaatggttgctggagttccggctgaaagcgtaccgccattggctgacgctggaaatgcctacatgggcacatctccgtattccggagattgattatcaggctatttcatactatgctgacccgacgaagaagaaagagggaccgaaaagtatggaagaagtagatcctgaacttataaagacgtttaataaactgggaattcctctggaagaacagatggctcttagcgggatggcggtggatgcagtaatggattccgtatccgtaaagacgacattcaaggaaacattgatggaaaagggaattattttctgctcgttcagtgaggcggtgcgcgaacatccggatttggtaaagaaatatatggggtcggtagtgggttaccgtgacaatttctttgccgcactgaattcggcagtgttctcggacggctcattcgtctatataccgaagggagtacgttgtccgatggaactttccacctatttccgtatcaatgcccgcaacacgggacagtttgaacgcacattgatagtagcggatgatgattcgtatgtttcctatctggaaggatgtacggctccgatgcgggatgagaaccagttgcacgccgctattgtagaaattgttgtacacgaccgtgcggaggtgaaatacagtaccgttcagaactggtatccgggagattccgaaggtaagggcggtgtatataactttgtgacgaagcgtggtaactgcaaaggggtggacagcaaactctcttggacgcaggtggagaccggttcggcaattacctggaaatatccttcctgtattctgacaggtgataattcgacggccgagttttattccgtagctgtgacaaacaattttcagcaggcggacaccggcacgaagatgattcatttagggaagaatacccgtagtacgattgtaagtaaaggtatctctgccggacatagcgagaactcctatcgcgggttggtgcgtgtggcggaaaaagcggataatgcccgtaactacagtcagtgtgactcgctgttgctgggggataaatgcggtgcgcatacgttcccgtatatggacattcacaatgagacggcggtagtggagcatgaagctacgacgagcaagatcagtgaagatcagattttctattgcaatcagcgtggtatcccgacagaagacgctatcgggctgattgtgaacggatatgcgaaagaagtattgaataagcttccgatggaatttgcggtagaagcacagaagttgcttactatttcgttggaaggaagcgtaggataaatgaattttaatcaagattatgttagagataaaagacctgcatgccagcatcaatggcaaagagatattgaaaggcattaacctgacggtaaagccgggcgaagtacacgcgattatgggaccgaacggttccggtaaaagtacgctttcctccgtattggtgggtaatcctgcttttgaggtaacgaaaggttcggttactttttatggaaagaatctgttagaactgagtccggaagaccgtagccatgagggtattttccttagtttccagtatccggtagagattccgggtgtgagcatggtaaactttatgcgtgctgctgtgaatgaacaacgcaaatataaaggtctgcctgcactgaccgccagtgagtttttgaaactgatgcgcgagaaacgtgcggttgttgaactggacaataagctcgctaaccgttcggtgaacgaaggtttctccggtggagagaagaaacggaacgagattttccagatggcaatgctggaaccgcgtttgagcattctcgatgaaacggattccggtttggacatcgatgcgctccgtattgtggccgaaggggtaaataaactgaagactcccgaaaccagtacgattgtcatcacccactaccaacgtttgctcgattatatcaaaccggatattgtgcatgtgctttacaaaggtcgtatcgtgaaaactgccggaccggaacttgctctggaattggaagataaaggttatgactggattaagaaagaagtaggagaatgacgatgaatgctgaacaacaatacatagatctcttctcacaaacggaagccatgatctgcaaacatagcgctgaggtgttaaatgcccctcgtgctgctgcttttgccgattttgagcgaatcggatttccgacccgtaagatggagaagtacaaatatacggatgtaagcaagtattttgaaccggatttcggtctgaatctgaatcgtcttgctattccggtcaatccgtatgaggtgtttaagtgcgatgttccgaacatgagcacagctctttattttgtggtcaatgacgcattctataataaggcactccctaaaacccatttaccggagggcgttattttcggtagcctgaaagaggtggccgaacagtatccggagttggtgaagaagtattatggtaagttggcggatacctccaaagatggtgtgacagcttttaatacgacttttgcacaggatggtgctatcttctatgtgccgaagaatgtggttgtggaaaaacctattcagttggtgaacatcctgcgtgcggatgtcaactttatggtcaatcgccgtgtgctgattattctggaagacggtgcgcaggcacgtttattgctttgcgaccatgcaatggataacgtgaatttcctggcaacgcaggtgattgaggtttttgccggagagaatgtggtattcgatatgtatgagttggaagagacacataccagcacggtgcgtttcagcaacctgtatgtgaagcaggaagcgaacagcaatgtacatctgaatggcatgacgttgcataacggtacaacccgtaatacaaccgaagtgttgttggcaggcgagggagctgaaataaatctttgcggcatggctatcgctgataagaaccagcatgtggataacaacacgagtattgaccatgcagtgcccaactgtacgagtaatgagctgtttaaatacgtgctcgatgatcaagcggtaggtgcttttgccgggttggtactggtgcgtcctgatgcgcagcatacaagttcccagcaaaccaaccgtaatctttgcgccacccgtgatgcgcggatgtatacacagccccagttggagatttatgcggacgacgtgaagtgttcgcacggagcgacagtgggacagcttgatgaaaatgcgttgttctatatgcgtgcacgtggaattgcggagaaagaagcgcggttgctgttgatgtttgcatttgtcaatgaagtgattgatacgattcgtctggatgcgttgaaggaccgccttcatctgttggtggaaaaacgcttccgtggtgagttgaacagatgtcagggatgtgcaatctgtaaatgaacataaaaatggatattcaaaagatacgtgaggattttccgatcttgagccgtacggtttatggtaagcctttggtttatttcgacaacggtgcgacgacgcagaagcctcgtctggtggtcgattcgttggtagatgaatattactccgtgaatgcaaatgtgcatcgcggcgtacattatctctctcaacaggctacggaactgcatgaagcttctcgtgagacggtacgtcagtttattaatgcccgtactactaacgaagtgatcttcactcggggaacaacggaaagcattaacctgctcgtctccagtttcggtgatgaatttatggaagaaggagatgaagttatcctttcggtgatggaacatcacagcaatatcgttccttggcagttgttggcagcccgcaaaggtattgccatcaaagtaatcccgatgaacgataaaggtgagctattgttggatgaatatgagaaactcttctccgaacgtactaaaattgtcagtgtagtccaggtttccaatgtcttgggcactgtgaatccggtcaaggaaatgattgcgacagcacatgcccatggtgtgcctttcctggtagatgctgcccagtccattcctcacatgaaggtggacgtgcaggatttgggagccgattttctagtgttctctgcccataagatatacggaccgacaggagtcggcgtgctgtatggaaaagaagagtggttggaccgtctgccgccttatcaaggaggaggagagatgattcagcatgtctctttcgagaaaacgacgtttaatgaacttcctttcaaatttgaagccggcacaccggattatatcggtacgaccggattggcgaaagcccttgattatgtgaacggtatcggcatggaacggattgcggatcacgaacatgaactgactaattacgctttgcgacgattgaaggaaattcccgatatgcgtatattcggtgaagcttccgacaggggagctgtaatttctttcctggtaggtaatattcatcactttgacttagggacgttattagaccgtttgggtatcgctgtccgcacaggacatcattgtgcacaacctttgatgcagcgacttggcattgaaggtaccgtcagagcttcgtttgctatgtacaatacgaaagctgaagtagatgcattggtggcaggaatcgaacgtgtcagccgtatgttttagtccataaaaacaaagtagtctcatatattaaatcgctgttccttgaaggaatggcgatttttttattctttaactaaaaaaagttccctccgagtgcagttatttggagtttgatgcgtctaatatataaaacgaatatttggagggtcgtgagactatgcttatattataaattctctctctttaacattaatggcagctatatcgtaaaatacatacggtatagctgcaactttttcatggatactgctattcatccctttttgattttctttcttttttacttgcttttttcgattgatttccatatttttagcgattgtaaaccctttaataattttggatctatggatgacattcttttctggctggttccggtcgcttccgtgttggccctctgttttgcctattactttcataagcaaatgatgaaagagagtgagggtacacctcaaatgataaagatagctgctgctgtgcgcaagggagctatgtcttatttgaaacaacagtacaaaatagtaggttgcgtattcttgggattggtgattttgttttcgattatggcatacggctttcacgtacaaaacgcatgggttcccattgccttcctgacaggtggtttcttctccggtctttccggttttcttggaatgaaaacggctacttacgcctcggcacgtaccgctaatgcagctcgcaattcactgaatgcggggttaagaatcgctttccggagcggtgcggtgatggggctcgtagttgtcggtctaggtttacttgatatttccttttggtatctgttgctgaatgcggtgattcctgctgatgcactgacacctactcataaactctgtgtgattaccactaccatgcttacttttgggatgggagcttcgacgcaggcgctttttgcccgtgtgggcggaggtatctatacgaaggctgccgatgtcggggctgacctggtaggtaaggtagaagccggaatcccggaggatgatcctcgtaatccggctaccattgccgataatgtcggtgacaatgtcggtgatgtggcaggtatgggagctgatttatacgaatcctattgcggctctattctggcaacggctgcgctgggtgctgccgcctttatccattcggcggatacggcaatgcagtttaaggcagtgattgcgcctatgctgattgcagctgtcggaatcattctttctattataggtatattcgctgtccgtactaaagagaatgcgacgatgaaagatttgcttggctcattggcatttgggacaaatcttagttcggtacttattgttgttgccacttttttgatactatggcttttgcagttggataattggattttgatttcttgtgccgtagtagtcggcctgctggtcggcattgtcatcggacgttctacggaatattacacctcccaatcctatcgtcctacacaaaagttgagcgagagcggtaagacgggacctgcgactgtcattatttccggtatagggttgggtatgctttctacagcaattcccgtaattgctgtggtggttggtatcattgcttcttatctgctggcttccggtggtgatttcactaatgtcggaatgggattgtacggaatcggcattgcggctgtcggcatgctttctacgttgggtattacgttggcgaccgatgcttacggtccgattgcggataatgcaggtggtaatgccgagatgtccgggctaggtgctgaggtccgtaagcgtactgatgcgcttgactcgttgggaaatacgactgcggctaccggtaaaggttttgcgataggttctgcggcactgaccggcttggctttgctggcttcttatattgaagaaatacgaatcggcttgacacgtcttggaagcgtggagcttactttcccggatggtggaactgtcagtgtggcaaatgccacatttgtagatttcatgaattattatgaagtaaacctgatgaacccgaaagttctttcaggtatgttccttggctcgatgatggctttcctgttctgtggactgacaatgaacgctgttgggcgtgcggcgggacacatggtagatgaggtgcgtcggcagttccgtgagattaaaggtattctgacaggagaggcggagccggattacgaacgttgtgttgccatctctacgaaaggcgctcaacgggaaatggttgttccctccttgattgccattatcgctcctatctttaccgggctcatctttggcgttcccggtgtgcttgggttgttgattggcggtttaagtagtggctttgtattggctatttttatggctaatgccggaggagcatgggataacgcaaagaaatatgtggaagaaggtaacttcggtggaaagggaagtgaggttcacaaggcgacggtagtgggtgacacggtgggtgacccctttaaggatacgtccggtccgagcttgaatattttgataaagcttatgagtatggtagctattgtgatggcagggcttactgttgcttggagcttattctaaaaagtgagaaataaggaagaaaaaggaggcgaaatacggtctccttttttatttcgtttaattttgcagctaaataaaaacgataaagatgttattaccttatttaaatgagaatctgattgaagcaggatgcgatgaggccggtcgtggctgcctggcaggagcggtatatgctgctgcggttattcttccgggagattttaagaatgagttgttgaatgattccaaacaactgacggaaaaacagcgttatgcattgcgtgaggtcatacaacgggaagcggtggcttgggcggttggtgttgtctcaccggaagaaattgatgagctaaatattttgcgcgcttctttcctggccatgcatcgtgccgttgatcaattggctattcgtccccaacatttgctgatcgatggaaaccgttttaataaatatcccggcattcctcatacaacgattgtgaaaggggatggaaagtatctttcaatagcggccgcatctatattggcaaagacatacagagatgattatatgaatcgtcttcatgaggagttcccttattatgattgggatcacaataaaggctacccgactaaaaagcaccgcgcggctattgccgaacggggaacgactccttaccatcgaatgaccttcaatttgttgggagatggacaactgactttaggtttttaaatcagtttgggcttcttctattctcatccgttctacatttttttgcagaatagacacgtttttgttatgtataaccgcaaaaatgttctatttaggctaaaaagctgttggttaatgcttttatttgttattgaaatactatatatttgcaaacaataacaaggattaaaaagtataaaatcatggcaacgaacaagctactttcttttatgaagctcattgggatgaccttcattatgacaattattactcttcctgcgaatgcgcagttcttacgtacttcttattttatggaaggtacacactatcgtcagcaattgaatcccgctttgacaccgacgaaaggatttattaatcttccggtgataggtgccgtcaatgcaacggttggttctacttcattaggttatcaggatattattgatattatagacgacggtggtgatttttataccaaaccaaatttcatgaaccgtttgaaagataataatacgctgaatgtgaatttcagtactgaaatcctttctgctggatggtataaaggaaagaacttctggtcattcaatattggtcttcgtacagatattggtgctaatttgaccaaatcaatgtttacgttcctaaatcagatggagacaatagaagacaattggagaaatagcaactatgatattagtggtcagcaattgaatatcaatgcttatacagaaataggtttaggactttcccgccagattaatagtcgtttgactgttggtgctagagtaaaggctttattaggtattggtaatatggaattgaagcttaatagaatagcaatgagtgctaatctacctactgaccaacaaataaatgaatggtctaatgatagctattggagtggctctttgggggagattgaaacaaaagctaaagacttgaaagcaaagtttgataactatcatgcaaacctcactgttggtgccgagcttaagagttctttcaaaggtttagaattaaaagaagaagagggtaaagattatgtaactgattttgactttgatagtggaaatttaggtatagctggttatggttttggcattgatttaggtgcgtcttataaaattctggataatttgactgtatctgcttctattctcgatttaggttttatttcttggtctaaatcaagtacaaagattgcatctgctaatccggatccaatcaatattaaaggaagtacttatgcagatatgattaatataactgacccacaaaatagtgttaagggtgcattgaatcagctacagaatgatactgaaaattatatggatcttgtgacgcaaggtgatgtgcttaactatgatatgttgcagctcgaagtaggtgaagctaaagaatctcggaaatctcgtcttgcttctactttagtattaggtgcagaatacggtttcttcaataataaattggctattggtgtattgtcaacaactcgttttgtacaaccagatgcccttactgaattgacattgtcagcaaactatcgtccgaagagttggtttaacgtagcgcttagttattcggctattcagtcagcaggtaagtctttcggacttggtttgaaattgggaccgatctttcttggaactgactatatgttcttaggaaagaactcaaactcagttaatggatttatcggagtttctattccattgaataaaagaaaagcttgctgtaaacaaggataaaaaataatttctctctctattctctttttattaatttctctagaagaaaaaacgtataatgtgcagcttgtcgcttatggtttatataagatgacaagctgtttttattttgcaggtttggacaacctcaattatgtggagtagtattccatacaagaggttctgagttgaatttagaaccatttgattttccggaatatcacgaacgccaatgttgacaatccgatggagaagagcacaatcagcgagaaagcgaaaggcacttcttccaagtggatatccacattcatgccatagaagctggcgatcaatgtcgggagcattaatacaatggataaactggtcatgcgtttcatgattgtattcacattgttcgagatgatggaagcgaaagcgtccattgtgcctgtaaggatatcactgtaaatattgacggtattgagtgcctgtttcaattcaataataacatcctctaccaattccttgtccaggtaatccgtgtcttggaaaatcgttttcagtttgccgatcatcacttcattgccccgtatggaagtattgaaataaaccagtgttttctgcaatcgcatcaggcgaagcaggtcctcattacggatactgcgttccaattccttttccgcagcactgatgtccagatttatctgtttcagatatttcagaaaccatacggcagaagaatagataagccgtaaaatcaaatccaacttattgcggacaatgatacctttccgacgggtatgctcgataaagtccggcagcaaatcagtgttgtaataacagacggatatgatgatttcattattggtgataatgccgatggggacagtgccgaaaggcagattctcgttttgcttgttctgcactggaatacgtaaaatggtgagcaaccaattcccctccgtgtctgtacgcgggcgttcgtcggtatcggcaatatcatcaagaaatgattcgggaacatttagtgttttagtcagaaattcaaagtcatcattgttcgggcatactacgttgacccagctattgggcagccattgtgctttttccacaaagccaacctcacaataaagatacgttctcatcttattgtctcctttcgttgtttagtacgagcagagacatcggatattaatgactctgttcgctttaattaatactagttgtgcacgttcgcgggtttgaatcgtccatatttctatgattttaatttaaaagcgttgcaaaggtaaataaaatagttggattgcccgttgataatcaactggcttaacatagattaagcgtcatcgtaaccatcttttttgtacctttgcgcccgaaaatcagagtgataatttaaatattgaaatattatgagtaagaaagcccttttaatgatcctcgacggttggggactaggtgaccaaaagaaagacgacgtaatcttcaacactcccactccttattgggattatctgatgaacacttatcctcactcgcagctccaggcaagcggtgaaaatgtaggtttgcccgacggacagatgggtaactctgaggtaggacacttgaatatcggtgcaggacgcgtagtttatcaggacttggtgaaaatcaaccgtgcgtgcgctgacaatagtattctgaaaaatccggaaatcatttcggctttctcttatgcaaaggaaaacggaaagaatgtgcatttcatgggactgacttccaacggtggcgtacatagctcactggttcatcttttcaagctttgcgatatcgctaaggaatataatatcgacaatacattcatccattgcttcatggacggtcgtgatacagacccgaagagcggtaagggatttattgaggaactgtctgctcattgtgagaaatcggcaggaaagatcgcttccatcatcggccgttattacgcaatggaccgtgacaaacgttgggaacgtgtaaaagaagcatacgatctgttggtgaacggtgaaggaaagaaggcaaccgatatggttcaggcaatgcaggaatcttacgatgaaggtgtgacggacgaatttatcaagccgattgtaaatgccaatgtcgacggaacaatcaaagaaggtgacgtggtaatcttcttcaactatcgtaacgaccgtgccaaagagctgaccgttgtgttgactcagcaggatatgccggaagcaggcatgcacaccattccgggattgcaatattactgtatgactccgtatgacgcttctttcaaaggtgtacatatcctgttcgacaaagaaaatgtggctaacactttgggtgagtatctttctgctaagggtatgagccagcttcatatcgctgagacggaaaagtatgctcacgtgacgttcttcttcaacggtggacgtgaaactccgtttgacaaggaagaccgtatcctcgttccgtctccgaaagtagctacttacgacttgaaaccggaaatgagcgcttacgaagtaaaagataaactggtggctgctatcaacgaaaacaaatatgatttcatcgtagtgaacttcgccaacggtgatatggtaggccatacgggtatttacgaagctatcgagaaagctgttgttgctgtagacgcttgtgtgaaagatgtgatcgaagctgctaaagcacaggattacgaagcaatcatcattgccgatcatggtaatgctgaccacgctttgaatgaggacggtactccaaacacggctcactctctgaatcccgttccttgtgtttacgtgacagagaataaggctgcgaaagtagagaacggccgtctggctgatgtcgctccgactatcctgaagattatgggattggaagttccggctgagatggacggtagcgtgttgattaagtaatttagatttttataattgggagggcggggtagaactccgccttttttgtctgatataaatattgcaaatgatacagattgatgatgtagttgtatcgctggatgtgcttcgggaaaagttcctttgtaatctggacgcttgtaaaggtgaatgttgcattgagggagatgcaggggcacctgtagagttggaggaagtggagaaactggaagaagtgttgccggttatttgggatgagctggcacccgaagcccgtgcgataatcgaaaagcaaggagtggtatatacggatgaggaaggagatctggtgacctctattgttaataataaagactgtgtctttacttgttatgatgagaagggatgttgctactgcgctattgaaaaagcctatcgtgaaggaaaaacagatttctataaaccggtatcctgccatctttatcctatccgtatcggagattacggaccttacaaggctgtcaattatcatcgttgggatgtatgcaaggcggcagtgttgctgggtaaaaaggaaaacctcccggtttatcggttcctgagagagcctttgatccgtaagttcggggaggaatggtataaagaactggaaatagcggttgaggaactgaaaaaacaacatcttctctgattctcggttccacgggatagtaagatgaaaagaaaaacgcctgctgtgagattactctccggcaggcgtttcctcgttgtaagatgtgaggttggtttataaaaacgtaatatgacaactatgcatcgatatttgcatacgttgcgttctcttcaataaattcgcggcgcggacctacgtcttcacccatcagcatggagaagatataatcggcttccgctgcattatctatatttacttgcttcagcatacggttttcggggtccatagtcgtactccatagctgttccgcattcatctcacccaaacctttgtatcgttggatgtgtacggcgctttcggaaccaccgccgtaagtgtcgatgaaattctgaagctgcgcgtctgtccagcaatattcttttaccttgcctttcgtacaaaggtagagcggaggagtagcaatgtacaggtatccgttctgaatgatttgaggcatatagcggaagaagaaagtcatgatcaatgtgtcgatgtgagaaccatcgacgtcggcatcggtcatgatgataatcttgtgataacgcagtttttcgatatttgcttctttgctgtcatcttccgttccgattgtcacccctaatgcagtatatatattacggatttcctcgctttccaaagctttgtgatacatggctttctccacattcagaatcttaccgcgtagcgggaggatggcttggaacatacggttacggccttgtttggcagtaccgcctgccgaatctccctcgacaaggaacagttcgcatttagacggatctttgtccgaacagtcggccagtttgcccggcagaccgcctccggacatcggagacttgcgttgtaccatttcacgggcttttcttgcagcgtgacgggcggtagcggctaaaatcaccttgtcaacaattgttttggcctctttcggatgttcttccaaatagtaggataacacttcacctaccgcttggtctacagcacccattacttcgttgttacccaacttcgtcttggtctgtccctcaaattgaggttcggctacttttacagaaataacagcggtcaaaccttcgcggaagtcatctcccgagatttccaccttcaccttttccagcattttgctgtcttcggcgtatttcttcaatgtacgggttaatgcgcggcggaaaccggccaggtgcgtaccaccttcgatggtgttgatattattaacgtatgagtgaacgttttcggagaatccggtattgtacatgatagccacttcaataggaattccctgcttctctgaattgagataaataacgtcgtttatcaagtgttcgcgagaagactcgatgaagcgtacaaactctctcagaccttcttccgaatagaattgctcgcttttgaagctgccgtcttcatttaccacgcggcggtcggtcagtgagatgcgtagtcctgcattcaagtaggccaattcgcgcagacgtgaagccaatattttgtagtcatacaccgtttccgtgaaaatgctgccatccggccagaattgttggcgggtaccggtaatgtcggaagtgccgacttcttttacagaataaagtggtttacctatttcatactcctgctggtaaatcttaccaccccggaatacttgagtagtcatgtgtgtggacaatgcgttcacacaagacatacctacaccgtgcagacctccggatactttgtaggaacctttatcgaacttacctccggcatgcagtacggtcatggctacttccaatgccgacttcttttctttctcgtgatagtctaccggaataccgcgtccgttgtcctgtactgtgattgagttgtcttcgttgattgtcacctctatgtgcgtacagtatcctgccaacgcttcgtcgatggagttatcgacaatttcgtatactaagtggtgaagtccctttacgctgatgtcaccgatgtacatcgcagggcgttttcttactgcttcgagaccttccaatacctggatactatccgcagaataagacccgttattgggagtgatttgttcttcgctcataattgcctttctaactttaataacagagcaaatatagtgaaatttgtcgacttgacgaagaataaatcgtgaaaaattaagaatggaagaggattctccgttttcttgggtgaactggtatgcaggtaattataaacaagaaaggccgaacttaaaagttcagcctgatgctatatagaattattaaattcttcttattaagcgagcttgttgatgtaaatagccaacttagatttcagattgttagctttgtttttgtgaatcacatttgtcttagccaacttatccaacatctttgtaatgcccggatacattgcaactgcttctgctttgtcagtagttgcgcgaagctttctaacagcgtttctcatggtcttgccataatatctgttgtgaagtcttctagtctcttcttgtctgattcttttcagtgatgatttatgatttgccatctcgactaatctgtttttttagttcgtttattcttttaacttgtagcccgtgggggaatcgaacccccctttcaagaatgaaaatcttgcgtcctaaccgatagacgaacgggccatcctgtgttgcatttctgcttttgctttctcgaatctgtgtttgtttctcgattgcggatgcaaaggtaggaacttttttgaaactgacaaacgattgtcgaaaaaaaaatagtttttttttgatgttatgctatacttgtttcttttatttattgataatcaggtaaatatatgatcttgattttcgtattttttttctatccattgaataatagacagaaatggtatttttaatacaccttattatatataaaacatcttatacttcttctactctcgccagttttcaatttttgaacactaatatgatatttaggggtcggtgcttcctttatcttatagaatctgtttactggttgcatattgtttcagttattttttagggcttgtttaaattttcttcaataatgcttttatagccgatattttaaccatttcctctgcagaatcgaatgttagttcatagtttcggcagaacttcctgtcattatccatccacgagaatgttcttcaaatatatccaaagaagcccattttctataatagtagtaaactgattcccatttagggaatttttttggtaacatacgtcactgacaacccgtttttactaaataaatatagtattccataccatgtgcaaattatattttcgttttcttgtttgcaggttcaaaactattgttgtatattgctactcagtttttgttaaatcagtttgatgctctatataatatctattataaatgtttgactgatgaaatagttaggcataccttgactataatattgcaaataaaatgattaacaaaaaaaaatcactttttttgattttgaaaaggctttgaatgactaattaaatagattatggaaaatagattaaaacaagcattggctggattatgggagaggtataaaagtattaatgatattttgtccgagaatacttattgttattctgaagtattgaagcaacatgatattctttttacaggaattaatccttctgctcgtgttaaggatgaaactaattgttctgaagcccatcattttaaatatgaagaagctgttgtgaatgatcgttattttagaactattgataaaattattccgaaaacattgaaaggtaaagtttcttatttagatttgtttaattacagacacactaagctaggtgatatcactaaatttttgaaaacatctcaaggtatatctttcttggcagagaatttgtgtataaatcagatgtttattgaagatgttataaaacccaaagtaatttgcgtaaggaataaaggttcttgggatttctggggtaaaaatgctacacctcaggaagataataatgtttggatggggtataaatttgaagaagtacggacttcatttgaacaaaaagagggaacgctagaagtttataggatcaatggtttgataaataatggacaacgtgttagcttttcctgtctgcctgatacaaatttgaaagggacaatcattgtttttgcaaaacattatcaatactcaaaaagggaagatcgtattaccgaagatatgattgcggaactatataaattggcaacaaaatagtagaacagtataccagcaagtagggatcccgatgtacttgatatatcgggattttcttattttgtgccttgatttggcatagcttgttctcatttttgtgccatttataaaatgaataatgagagcgtataaacaaattatattggaattgatagacgacatttctgttggtacatatgagcgtcgacagttacttttattatctatactttgtgccttcgcaggtgaaaatatattcttgttaggtgccccaggagtagctaaaagtatgattgctaaacgtataaagttattattctataatgcaacagcttttgaatatttgatgagtcgctttagtactcctgatgaaatattcggaccagtttctattcaaaaattaaaagacgaagataaatatgaacggatggtaattgggtatcttcctactgccgatattgtgtttttggatgaaatttggaaagcaggtccttcaatacaaaatgctcttcttacaatattgaatgagaaagtctttcgtaatggagataaagaaattcgattacctgtaaagttgataattgctgcgagtaatgaattgcctgcagagggagaaggcttggatgcgttatgggataggtttttagtcagatgtgtagttgaaaatatacaagacaagaaccttttttatgagatgataacttctgtacaggatgataattatcatatttcaataagctgcccgttaacagaaactgtttattctcggtggcaaaaagattgtttgggaatcgggataagtccaataattaaaaatgttgtagataaaataagggataaaatatcagaggggaatcaaacgaatgttgagtctggggttctatatatatccgatcgtcgttggaaaaaaagcattcatttgatgagaacatgtgcattgttaaacaatcggcaaaaagtgaattttacagattgtttcttgctggaatatattttatggaatgatgattcacagatttcttttgttagggatatggtgaagaggtctataacggaggaattgctgcagtcctatgttgaattataccggaactatagaaaggaaatagaaacactgcatgcggagataaaaattacgattaaaaggaaaaaagctccaatacccaatagtttaataattgtagacggattattttatagaatcaatactgtggaatcacatcagactcttattcccatttcactttatagtaaactatccgatcagaatgaacaggcaaaacttcataaaaatggaacgtattggcagctgacattagtgacggattacaattatcgtgttctaccagatatattggttagaaaaggagaaaatggttgcttgataattaatgaacgggagtatcctttggaacgttatgatagtctacttattataaaccgttatgcaacgcagatttatgaagtcttgttagataaaagaaaagaattggatgaattgaaaaagaaactgatacatgatattgaacaatggaatgaagatattgctgataatatatttaaggataaagattgggtactatcaggggaaatggagcttgtgacattaataggagaactttctgccactatttttgagatagatcatgaagcctgataagtgtaaagatgatcaagtctatttatctgtagttgatcgaggaggatattcaataaaagactatttggccgagatgtctggttctatacctatttgtattagcgaaaatgtttgttcaatggaagtattagaaatgtatctgcaagaagttttaaaagataaacatgatttgacgatattcgctcgtgaagaaaattattttcatcaatgtatgcagatggatctctctttatttcagaaaaattgggaaatgttatgtaaggctttaataaagacttatcaagtagataatagctttttgtcctatttcagtatgaagttggaggcaaaagataagtatgcccaaggagaattattgctatggtggaagaaaaggctggcgagaaagcaattggcttattggatagcattgctggattattatagaaatagatttcagaaacttatatacactgcaatgaaacaggaacataaatcttctatagataaaagcctttggtggagtattgataaaggtatatggagaaaattggatatttctatttatttgaaatatcaattattatttgaacgaaataattcacttcaaactctggctgattcattgggaaggcggaagggagaaaagcaaaaggagaacaaattagaatataagcacaaaatgactgatacgaatgccaaagttgatattgagggcatttgtgagggtaatgatttaagtagtgttttatgccatgaatttgcgctgttacatcgggacattgattctttgttttataaaaaatacacttctcgtcaactggaacagtggtcatggaccagggaatcgtccttgaaaaagaaggaaggaatggcttcctggaaagaaaaaggccctgttattatttgtattgatacgagcgggtctatggttggtggcccagaatttgtagctaaagcagcgtgttatggaattgtttatacggctttgcgagaaaaaagggaggtgcttattatcgctttttctataaacataaaatgtattgaactaatagattgggaaaaggataaacataagattgagaactttttatctcattcgttttatggtggaacgcgaatggactccgctttgcggcaaacgatggatttattaggcatgaactgttataagcaagcagatgtcttgctaatttcagattttgttatccctaaactaccttcggtatttgtgaaggatataaagcaatatcaggaacaaaagacggtatttcatagtcttcagataggtgatcatgttaattgcgatattatgcggctaatgaatgaaaagtggaaatatgataaggacggtggtaatataataaatatcgggtaattattaggtatattctaacaagtagtgtcgtgttttgacataccttattgccaattttgcaaatggtaacagaaataactaatgatatggaaataaaagagcgtataaagttattgttgactgaaatgaataatggtgtgtacgaaaaggacagggaaatagggttgtctttattggctgcctttacgggcgagagtatattattgtttggaccacctggggtcgtaaaatctgtgattgctagacggctaaaaaatgccttttccaatgcgaatagttttgaatatctgatgtcacgtttctctatccctgatggaattgttggtccgataagtcttagtcgtctgaaatcttcagataaatatgaacgaaatatagaagatatctgccaacagttgatgtcgctttttagatgaaatatggaaggctgggcctgctattcaaaatatattattaacagtgataaatgaaaaagtctttcataatgaagataaagaaattcacttaccattgaaatggttagttgcttatgtttaacttaattttgtttacgattatggaaaaacaagaacgaattagtacctttattggtcaacatgctgatgaagtcaacaagggaatgtttcgcgaaaagttcgagaatactttgtttgatccgaaccccaaggacgtaaatgacaaattggtgtttattattcgtcctatgccatttttgaagaatccgaataaatcgttagttggcaagaatgtctgtgcatttactgacaaccttggaacatttttgttcgattctcgtacaacattcaatcgtccggctgaaaatcactacgagttttgcgaagtatccgatgtttggttgaaacttcgtaactcgaaagatccagtagtacagaataaaacacaatttcttcgtatgcgacgtgaaaactatgcttacgtgcaaatcattgcttatccatcagacccgacaatgaacggaaagatgctgcctatgcgtataccttttgaattagtaaagttgtttaattctatggcacgtccgtctgaacaagaagtagcacttggaactaaaccagtgcaggcattcgatttatacggtggcaaagaaattaaatgtacagttatcggtaagattgttggtgcaattttaatgcgtgaatggaaagtcgaagcactaggagaaccgaaagaagctcagttcccgcttggagtcaacggtgcaatgacacagatttccaaactgaaacaagaagatgttttgaagtacttcgaagaagcgcaaaatgttgatctggaaacgcagtatggctatcatgaaccagttttggatgtgaaacgtcgcatgaagaactatctggcacgggtcgtagctgatgttcctggaatcagagaatatgttgcaggattatttccagaagtaactgcagctgcagcaactgactcaaatacatagggtggtgctacgatatttgcccctggtccacaacctgctggaacaatacagcagctagcagctcagccattaccgcaaggacagccgcaggcaattatagctggcatccgataaaccctatggctgttcaggcacaacaacctactagcggacaagcacctgaagtgccaggtactccagtattatcgtaaaggatacaattttgtgaagttttgaatgataacctttttgaaccgaccagtacataattaagtcgttggctgatcgtttttttataggtgatattttatatcataattataaagatggggattgtattactactgtgatggctaaacctaattgtcggtattctaggataatggaattatgatataatagagtttctcagataaatgataaaatggctcctattatttgtgccacaagtcttggattaagtgatgatcttgaaaatgcaatgttcgtgttcaaagattaaaacacatatctcgcgctggggagttgaagctgacaacatttgaaatactcttttcaatttcactgtatttaacattctgcttgtcatatcttaaggggattaaatttttcacaccattaagatatgaagtttatactaaactacagaactgaattgttgatgattttcttggtactgattcgttcgctatgatggtatcgtttggtcgatactatcaatttatacgggtgcactttattggatttatggttattccttattaaagaatgttcaaaagttgaattctgtaataatcaccaaggagatttttagagggctgattgcaaggataaagaagaaaaaatataaataagaaaaattctgtctcaataaatattggatttttatattgaaaacccctatatttgtagataacgaattataaaaaagatggcaaaagatttgtttaatagatatatttggctggtggacattatctatcgagtaggaaaaattacatttgaagaaataaataagaggtgggtgtgctgtgagatgagtggtggagtggagattcctctccgtacttttcataaccacagaaaagcaatagaagaattatttgatataaatatagaatgtaataaacgtggtggctattattattatatcgagaataaagaggatcttgaaaaaggaggggtacgtgattggttattgaatacatttgcagtaaataatctgattaatgaaagccatagacttaaacaacgtattttatttgaagaaataccttctggtagacaatatttgacttctgttattgaagcaatgcgcgacagctttataattgagttaacttattggagtttttggcgtgatgaaccacatactttttttatagaaccttattgtgttaaagtgtttaagcaaagatggtatgtcataggatatgctcctcattataatgcaatacgtacttatgctttagagcgtattcagaatttgaagattacagataaactctttatttacccaaaaggttttgacccacagtcttatttttctacaagttttggtattacagtagatgaatcttataaaatagagaggataagaataaaaacttttggaaacaagagtaaatatattcatgctttacctttgcatgctagtcaacaagaagttgaaaatacagtagaatattctgtctttgaatatttgttacgtccaacgtatgatttttgtcaagaactattgtctcatgggagtgatttggaagtgttgtcccctcagtggttgagagagcaaataaagaaaattataaaggatatggaactgttctatggataacttcatcgaacatgttttctgcaaagttattaatatgatagaggtagatttgtattttcttttaattagatagttagtgctgacacaatctaatgtagatgttttgatgagaaaggagaaatctttttcgacctattattttgttatttaatgcctatgagaactttctgctttccatgcatttttgtaattttgttctagattgataacgaggtaaacactatgctgcaaaaaacgagaggaatcgttcttcatacattaaagtataatgatacttctatcattgtagatatatatacggagctttccggcagggcttcttttcttgtggcagttccccgttcacgaaaagcagcggtgaaatccgttcttttccagccgttgtcttttattgaatttgaggcggattacagaccgaatgcgactctttatcgggtgaaagaggcgaaatccttttatcctttttcttccattccctatgatccttataaatctgcgatggcactttttctatcggaattcctttatcgggctattcgggaggaggctgagaaccgtccgctgtttgcttatttgcagcattccatcatttggctggatgagtgcagggaaggattctctaatttccatcttgtttttctaatgcgtctttcccgttttttgggcctttatcccaatctggaagactatcatgccggtgattacttcgatttgctgaatgcttgttttacttctactcgtccccagctgcattcatcctatatcaatcctgaagatgcgggacgtcttcggcaattgatgcgtatgaattatgagactatgcatcttttcggtatgagtcgtgccgaacgtactcgttgtctgacgactatcaatgattattatagtctgcatttgccggatttcccggtattgaaatcattagaagtgttgaaagaactgtttgattagctcctttcggctgataggcactgatttagtagatgaaagaagtagggatacaatgtgtttattccctgcattgttcatattggataccggtatagatggtttgtcatggctgtggtgacttcttcccacggccgtgacgagatcctaccacaaccatgacgagatctcgtcacggctgtgacaaattaactatgccggtgttttaacagaacaatgtcggtagttttataaacttatgccagtgctttgatagatgaatgccggtacttgaaggatgatgagagacgttttgaggaaatgatgagagatacgtaagcgtctcggcgatgccatattttctatcttaatttttccttttagctttgcttcataataaaaaaacacatcttatgactgcacatgacttgtacacccgtaccttatcggattataaatcctgtttatgttcttctcctgccttaactcttcgtagttattgccgtgaacgacatgtaaactaccatggtatgtgtctttggctttcccgtcacggcatcagtatccgtgagttgcgtccctcctcttccgtcaccaccgctaaagagcctgcatcctctttcagccgtttgtttccggtctgctcttccccttcctcctctccggatatgctttacggggttaccatcactttccctgacggagtgactgtctctatcaagcaaggcagctcttttagcgtcagccgttttatcgaccgttataacagtaaaattcaggaggaagagtcatgtttgctttaaccgatggcatgcattattatctgtgccagcattatgttgatatgcgtaaaggcatgaccggactttaccggcttgtcaagtccgacatgtccctttctcccgtttcgggtgatgtatttgtgtttttctcccgcaaacgtgacatggttaaaattttgcggtgggatacggacggttttattctctatcagaaacgactggaagaaggtacctttgaggttccccgttttaatcccgatacagggtcttatgagctctcatggaagacttttcttttgataatgcagggcgtctcgctccggtctgccaaatgcaggaaacggttccggttgaagtaatacaccgatgcaataatctgtatatcaatatattatattataaatacttcgctgatttatttgtcttccggttcttttttcttatctttgacacatgcaaaaggaccggctcatagaacttctggaggatcaaatcagatctttaaaagaacagcttgaagcggctgccaggcgtgaggagcatgggcagctgcttatctgcgaattgacgatgcaggtccggcaattaaccgaaagtgtccattcattagaagaggcgttgaccttgaaaaatggtaaactgaaaaaacaggagaacatcagtcgtggcttaggcaaacttataagcaacgagtctgaaaagcaggtaccgggtaaggcggaggcggtccggcagacggctccctcccgtccatgcccttctcccaaagagcggggaaacaataaatccaaacgcaaggagcattttgaactggaagagaaggtaatcgaagtcaatcccgaacatccccttttcagcatctcccttgccaaattcatgggataccgtgattctatccgttatgtctacactcctccgaaatttgaaaaacttgtctaccggcaaaacatctatagcttaaacggaacagtcttctgcggttccgctccccaggcacctttccttaactcaaactacgacggatcttttgtagcgggtttatgccagttgcgctatatctactctatgagtgtggagcggattatcggcttcttccgtgaaagcggatttgagcttgaaaagcccaccgcgcatcacctgctgggcagagcggccgaaatgttggaaaacctttacagggcgttgagaatggccgtgcttggagactcttatctttgttgtgatgaaagttaccacaaagtccttgtggaagagaagaacagtagaggcaaaggggtaaggcaggggtatatctgggcggccgtcgcggtcaagcagaaattgatactgtacctctacgagaatggctcccgtagcgggaaggtgctttttgaccttctttccgaatatgaggggacagtacaaagtgacgcatacagtccgtatagaaaattggaaagtgacgcctatccgggaattaaaagaatcgcctgcctgcagcatgtcaaaaggaagttccttgaggtacaggaggaaccggacgcacaaaagatcgttgaactgacgaacaagctgtatcaaaaagaacacgaacactgtgttggtcgacagggatggacagacaaagataacctcaggcaccggaaaaggtatgcgccgcagatactcagcgaaataaaacgggaactgctcaggataaagagtaagcctgacttgcttcccaaaagtgagatggcgggagcggttgactatatgctctcgcaatgggaggccattaagggcatctttactgaaggatattattacttggacaataatttggtcgagcggtacaaccgatatatatcactgtccagaagaaattcccttttctttggaagccataagggggcggaaagaggtgccttattttattcgctggcctgttcatgcagaatgcagggaataaataccttcgaatatatcacggaggtaatcaataaagcggcaaagctaccaccaaatacggacataaaggtatatagaaatttattgccggacaaatggaaagaaaatagaagtaggatcgaaacataaagaggagatgctacttctattttttttgaggggggggacggcatcgccgagacgcttacagagatactgggagaaatgatgagagataactcatcgtgagttatctctcataaagtatattgctgatatttaatcttttatctctgatttatgagagatgagagatcgaaagtaaaaaaaacttctcagtagagagtgggtgaattatcctaaaagctcttttacttttgctgagatggcacggccttcggcaagtcctgccaatttcttggaagctactcccattactttacccatgtcttttccgctggtggcacccacttcggcaatgatttcctttaatgccgcttccagttcttcggcagacatttgtttcggcagatacttctccataacggctacctgtcctagctctgcgtcagccaagtcctgacggccttgtccgatatagatctcggcagagtcctttccttgttttacgagtttctggatgattttaagtgccgcgtcatctgtcagtgtatcgttagctcccggagcagtctttgcttcaaggaaaaacttcttaacgtttctcaaagtctctaaggctactttgtcctttgccttcattgcgttttttatgtcttcgctgactttatcaaataaatccatactattataattaaaaattaaagattaaaaattataactgaagcctgattctgcgagtttataatcttcgtttttagttctttgtttagaacgtaatcacgccattctcgtctgttgcttcttccgttgtgacttcttcctccaaagcggctttggtccgtatcttggtgagggttgtcttatcgcgcatatatgtgggagaatcttctaccatagcgatgatgtcgtcgttgtccaggtcttccatattgaagaggtagatgtgacgacgtttgcgcagactcttgcttccgatattgctggcgctttctccgtatgctttgcggatgcgttctttgtttttctctttttcttcttccagttgcagttggcgttcctcttcttcctggctgcgcgcagcgtgcaggctgtccatgccgggaacatcctctactccgaatccggttgcaagtacggtaatcttcacttttgtttccaaagagttgtcgatggcaacaccccagataacctccacgccttcgcggaacttactcatgaattcatgtatctcgttcatctcttccatcatcaattcggatgacggacagaaagaaacgttcaacatcacctttttggcgttgaagatatcgttgttgttgagtagcggagaatgcagcgcatcatcgattgctttggttacccgattttctccttcaccgaatccggtactcatgatggctactccaccatctttcaagatagtcttcacatcggcaaagtccagattgaccgtaccgcgcatggtgataatctcggcaatacttttggcagcgatggagagtgtatcatcggccttgccgaatgcattcataaaggtaaggtcggcatatatttcgcgcaagcgttcgttgttgataaccaataaagcgtcaacgtgttgagcgatacgttccacgccgtccaacgcttggataattttcttttccccttcgaagataaaggggatggtaacgataccgactgtcagaatatccatctcctttgcgatgcgggcaatgacaggggctgcgccggttcctgttccaccacccattccggcagtgatgaataccatcttggtgccgtcgttcagttggtttctaatgtcttctatactttcttcggcggcatcgcgtgcccgttcgggacggttgccggccccaagaccttgtgtgatgctacggcccagttgcagtttcaccggaaccggtgattcggccaatgcctggttgtccgtgttgcaaagaacgaacgttacatcatgaataccttcccggtacatgtggtttacagcgttgccaccaccaccacctacgccaatcactttgatgatcttcggtgaatctgtcgggaaatcgaattgtactatctcgtccataatcttatgctaattactagttactatttacaaattacaagctatgtctccggaagttatttcatttcatcatcttcattgaagatgttggtcatttcctcaatcgttttcttcatttttgttgtgaaccaaccgggcttagcttcttttttccgcctttctttctcctccttttctttctgcttgcgaagtttctcggcttctttggcagccagtttggcttctcgttcctcttcctctttcttgagtcgggcgatgcgggcctgttctttcaaatcttggtcgttttcgaacatatcggctgtcttgagaacttccgcttccggtttaggagtgcccggagcaggttgagaaacagtttctatcaggcagcaattctggttcccttcaaacagaagtccgaataacgtattctgcgagccgtcttttttcaggatatcactaggggcatgaacggtattgcgtggaagtcttgccattctgattttctctattttgctacgtttgcgcaacatctcttccaggttctttaggttggtagctcctcctgtcatgataattcctgccagcagtttgtcgtcaaagccggagagttgtatctgattccatacattggcgatgatttcttcggcacgggcttcgatgatattgttgaggtcggctactttaatgatacggctgtcatcgtccagtttgcaagtagcctcttcttgttcgggctcttcttcataaagagcgtcaccgtaggttttcttcaaacgttctgcttcttcctcttccatctgcaaggtggtgatgtctcgtgtgatactgttacctcctagtggcagcacagtcaggaagcggaggatattgtttttgtaaacggagatggtagtcgtatctgcaccgaagtcgaccaaagcgcagcccgaacggcgttcgctttctgtcaataccgcgttggctgtcacgagcggggcaatcagttgttcggctatatctatttttgcctgttggaagcaatgctccaaattcttccgcacggaagcacgggcgacaatattgaggaaacggccttcgatatggcttcctaccagacccaccggattggcttgcaggttatttcccactttatattcctgtggcgctacgtccagtatgtccatatctaccaccgggatggcgatgttctcgtcgccgatagcactgacaagttcctccgatatgatggcttcttcttccagatcgcgacttaccacgttgcgtactgtgcgaagtgattggccgccaatacctacatatactttagcaattgagtttttcaactcaccttccagtctgttgatgatagaagtcagactttgtgccgtcttgtccaggttaaagataactcctttacggatgaacgtagaagagtcttcctgtgcatacgccagtatctgcatacttccgtcactgttctttcttccggccacaccggttatcttcgatgaaccaagttcaatagcggcgataaattctgttgttgccatctctttatttactatttaattgtttacagtttactatttggagagatctgtcacttatatctcatcacttatcactcatcgttctcttttcgtacagataatctgattgctgaattcaaggttgatgcgtgaatatttgttccagcctaccttattgagccctttcttatagaattctttcaggcgtgccagtttgtcttcaaagtcatccagtttgccgagatagacaaggtggtctcccacacgtggcactaattcgatattgcggtcgggcaatacatgaatctgttctatctgcgcatcccagaacttattgttatgcaaaaatacaccaaacttatataaatccttcattgcaaacgacttttctacgtttccggtgacaattacccggtgagcgacgcattttgcatcgggaggcatgacggttcctttgttgtcaaggtagtaattctcaccgttggcgctcattacccgtaagatgggaatgcgttgtgtcacttccacgcagactttgccgctaggagtcttgtagcattctgcttcgtcaatcaacgggtgtttactcagttcccgttccaatgacttggtagagatgcgtcccatctttttcccgatggggtagatgccttttttctgaaggatgcctttcagttcgtctttagtgatgaaaccggcataagcggtatccttgataactaattccatgtcacggcaggtctggtcggcaggcttgcggttgaaggcgctgacagctacgaccaggtaggctatgagcaccaacatgacgatggacagaaggattctctttaccataaattattaatcattcttcctttccagtattttctttatctcggggacatagttgtctatatctcctgctcccaaagttattaatacttcaatgtttttatctttcagaatgttcagtatatcttcctttttgcacatacttttttcgataccgggacggagattgtcgtaaatcagccgactggtaactcccggaatcggggcttcgcgtgccggatagatatctaccagaatcacttcgtcaagcagcgacaggctgtcggcaaagtcttgatagaaatcgcgcgtacgggtataaaggtgtggctggaagatagctgtgattttcttgtctttgtaaagctcccgcatcgacagtacactctgcttgatttctgaagggtgatgggcatagtcgctcaggaagactatccggtcgttcttgatcttaaagtcgaaccggcggtctactccccgaaaactagccatgcctcttttaatctcttcatcggttactccgttcaggtgtgccaatgccatagcggctacgccattttctatgttgatactcacgggcactccgagttggatatcattgatacgggtatccggcgccacaaagtctataaatatctctccgtttccgatgcggatattctctgcatggaagtcgccctcgtcacgtgaataggtgtaaacgcgtacaccgggttgcactttgggctgtaatgagatgcctttgcggatgatcaatgcgccgcccggctggatgagggttgtgtaatgttcgaaactttccagataagctgcttctgttccgtaaatatccaagtgatccggatcggtagctgtaatgacagacataaacggggacagccaatggaaggaacggtcgaattcgtcggcttcgattaccgtgtaagggcttttctgtgaaagcaagaggtttgttccgtaatttttcgagattcctccgagaaaggcggtacattctacgtgtgactgatggagcagatgtgccgtcatggtggatgtagtggtctttccatgagtaccggctacacacaagcctttgctcgaatgtgtaatcgttcccaatacttgagcgcgtttttgtatctcgaatccgttgttgcggaagtaaaccagttcttcgtgttcctgtgggacggcgggggtgaatacgacgagcgtactttctgtgtctttacaagcttccggaatcaaatccacattttcttcgtaatgtatctgcgcgccttcggcaatcagagcttcagtcaatggagtgggagtacggtcatatccggctactaccttgcctttgaagaggaagtagcgtacaagggcactcataccgataccgccggcacctacgaaataaactgattttatagtttcgatattcatttcttctatctttagtatttgtatgaatcgattagttctttgcttccgccagttttatcacttcctgcgcgatgattttcgcagaatcgggtaaagccagcttggctatattctcgcttaattcttttaatctccgctcatcattgacggtggttaaagcaacatctaccaatgtcttttccgcttcgctgtctttgacgtagatggctgcctgtttgtctaccagtgctagggcattcttagtctgatggtcttcggccacattgggggaaggtaccagaatgacaggtttatgcaataggcagaattcagagatggagcctgctcctgcacgggagataacaaggtcggccgctgaataggcagcagccatatctttgataaaatccgttacatatagattgggaagtgcgcctgccgctttcacagcttctgtcacttgcggatagtaaaatttaccggtttgccagataaattgtatgtttccgttttctttgattgtcgctaatccggcagtcagcgtgttattgatggtgcgcgctcccaagctgccacctacgataagaatcgtttttttgtccggttgcagatggaaagaacgtagtgcgtcctctttggacggcatatcttttgtcaggttctgacgtaccggatttcccgtcatgataatcttatcggcagggaagaatttctccataccgtcataagctacacagattctccgggctttctgtgccaatagtttattggtgactccggcatacgagttctgctcctgtatcaaggtaggcactcccatcattccagcggtcttcaacgtgggaccactggcgtaaccgcctacgcctaccgctacttgcggacggaagttcttgatgatactgcgcgccttccattggctgcgtatcagtttgatgattaccgatacattcttccataaatgcttgcggtcgaaaccggctatcggaagaccgatgatttgatagcccgcatcgggaacccgttgcatttccatacgaccttccgctcctacaaagaggattttggcgtcagggcgtaactctattatcgcgtttgcaatagagacggcgggaaagatgtgccctcccgtacctccaccgctaagaataattctaagttctttttccatcatagttcttttctcctatccgtttcgttcagttggccgtttcgtgctactgaccgttcattgcttgtcactctcatcctcgaattttgcatcgctgttcaaaatctgtgcagttggctcggcggcagtctgagcttccgaattggcggccgcatctgtcgcgatctgcaactgaatctgcgcatcgtgcgctttctgttcttccagatgagcggtatatcggctgacgcttaatatcattccgatgtaagcacaattaatcaatgtacttgttcctcctttgctgactagaggtagcggttgtcctgtgacggggaatagtccgacggcaaccatcatgttcagtattgcctgcgataccaacaacaaggcaatccccatcacaaggaaggcgggaaaagtcctttcgcatttctgggcgattcgtccggcccgcatcagcaagcatagatagaggaataccacgaatatcccccctatcaatcccatctcttcgatcacaatggcgaagataaagtcggagaaggcttgactgaggaaatcgcgttgtattgagttgcccggacctttgccgactacattgctggtagcaatggcgattcgggcgtgtgctatctgtgcgtctttatcaatatcgaacttggcggcaggtacctctttattttcgaagaagccggaaacacggttctgccaggtctcgaaacggtgaagtcccggcgtattgtgcagtgtctttccgggaatggccattagtattcccacagccactatgcctacaagtgccattagccccagcataccgaacagtttcttggaagatacccgcccgatgaacatcatcatacatacaactccgaatagcagcatggctgttgaaaggttttccggtgcaataagcagaaagaccagtccggtaagaatcataatgtatttgaaggctttcgggttggctccgtattcgtcctgtttcttggacaagataaatgagacggcaatgataaccgccatttttgccaactccgacggttggaactgtaatcccataaaggtcatccaacgcgcagctccgttgacacggtcgcctgtaatgatacccatcagggtgacaaatgccaacagtaccagagaaatcggatacaggaagaccggaaatacctgaaaccatttgtagggtatgttgtgtagaattaccactactactgcacccaccatcagaataacagagtgctgtgtaatcggtccccaatggtcgccacttttataggtcagtgtcgacgctgccgagaacacctcgattatcgagatgaggcagagacaaaggaaaataatccagattaccttgtcgcctttgaatatgttctttaataaatccaatcttgcagaaattaaaaattataaattaaaaattaaagggcacggacgcattctttaaattgctcgccacgatcctcgtaactcttgaagaggtcgaaagaagcgcagcaaggactcaataatacggtttcacctttcttcgccaatttataggcggcttctacggcgtctttcatgccggtttgcacgtctgctacgggcaaaccgaaacggtcgaagaaatcatgcagtttctcgttgtgaagtcccatatatacaagagccgagcacttttcgcgtaccaggtcttcaatttccgtatagtcgtttcctttatcttttccaccgagaatcaatactgttttggtagtcatgctttgcagggcataccaacacgaattgacgtttgtcgctttggagtcgttgatgaaatcaattccacggacacgtgccactttctccaaccggtgttccacgcccttgaagtcggagagggccttgcgtatgttctctttggtgatacctgccagattggctgagataccggctgccaaagaattgtacaggttatgctggcctgtcaaagccaattcctcctgttccatattgaaagcaatcggctcgttgattttcacttcgtgatcttctacatatgcaatcgctccgtcttcctttacggctgcgaaagggtagaggtgtgctttcagaccatgctttgccaattcgcgtttaatgatagggtcgtcgttccagaagataaaagcgtcgtccggagtttgattctgggtgatacggaatttggcatcgatgtaattctgcatacaatgatcgtagcggtccagatggtccggagtaatattcatcaatacggctatatttgcacggaagttatacatattatccaactggaaagaactcagttcgataatataatagtcatggtggtcttcggctacctgcaaagccaggctcttgccgatattgcctgccaaacctacattcatacctgcactcttgaaaatatggtagatgagggaagtcgtagtcgtcttcccgttcgaaccggtgatacagatcattttggcgttcgtgtaacgtccggcaaactcaatctctgatataaccggcgttccttgagctttcagtttcagaatgaggggagcgtcattcggaatacccggacttttgattacttcgtcggcattcagaatgagtccttcggtatggcggccttcttcccagtcaatgtggtggctgtcgagaagttccttatacttgtccttgatggcggacatatccgaaacaaacgtctcaaatcctttgactttagcgagtacggctgcacctgcaccgctttcgccagctcctaaaattactattcttttcatttacactaatgtgctcttgtctccaatatgctgaattgcctattagttgtgcacatcctttaaaagttaataatcgggttaatactctctgattctttattgttaattcacgcctcagttatcttcagcgtttaccttattttcagcgttataatcgttatggctgccagcacgatggtcacaatccaaaaacggacagtaatttttgattcgtggaacagttggtcgggcttggtgaacttcaccgtacatcccggttctatcaaactcatggaagtgcggaaatgatcgtgaatcggcgtccgtttgaacagccgttgtttcactccttttcgttttccggctttatagtaagcccgttggagaatgaccgacagattttctacgaggaatacaccgcagagaatcggtatcagcaattctttatggatgatgatggcgaatacggcaatgattccgccaatcgtcagactgccggtatctcccatgaatacttgtgccggataggcattgtaccagaggaagccgatcaatgcaccgataaaggcgcagatgtaaattacgagttcttccgatcccggaatgtacataatgttcagatagccggcaaactcaatgtgtgatgatacgtaagccaatatccctagcgtagctccgatgatggcggagttgcccgccgccattccgtccatgccgtcattcaggttggctccgttggatacggcggtaacgacaaagatggtgatgataacgaacagtacccatccggccgtttgtgcgtgatcgcccatgaaagctaccagatctgcatagtcaaggttgttgctcttaaagaaaggaatggttgtctgggtagatttcaagtcatttgttccgtgtaccacttccatctcctgtcccggattgtgtatctcgatgttttcgcgaatgaccacgtccggacttaaatataaagtaagtccgacaatcagtcccagacctacttgcccgatgatcttgaacttgccatgcagtccttctttatctttcttgaaaatcttgatgtagtcgtcggcaaaaccgagtgatcccagccatacggtggtgatcaacataagtatcatatatatattatgcaacttgcctaaaagcaggcaaggaatcaggatggctgtaatgatgatgacgcctcccatacttggtacgcctactttgttgacgccgaacgggtcgattttcgcatcccgttgtgtctccgtgatttgtttcttcttgagcaggttgataaacttatctccccagatactcgaaataagtagggcgaggataactgccatcagtgcacggaatgaggtatatccaaacattcccgctccgggaaaattgagcttatgcagccattcaaacaaataatataacatttcttcagtggttggtgtctaatcgttcaacattctcttcacttcttctttgtcatcgaagtgatgttttactccttttatctcttggtaattctcgtgcccttttccggcaatgagtattacgtctcctttctcagccagcatacaggccgtacggatagcttccttgcggtcggcgatgcttaatgtttttctcatgtcttctgcatccagtccggccaacatatcgttgatgatgtcttgcggctcttcaaaacgtggattgtccgaagtgatgataacacggtcgctggctttggcggcttcctttgccatgatggggcgcttgcctttgtcacggttgccacccgcacctactacggtgattacttttcctttcccttccaataccccgtgtatggcattcagcacattagtaagggcgtccggagtatgggcgtagtcgacaattgcggtaactccgtcttttgaacgcacagcgtcgaaacgtcctgcaaccggatgcagtgtgctaagggcaaccaacacatcttcttcttttttcccgagcaggacagcggcaccgaataccgctaataagttggaagcgttgaacttgccgataaactgaactgccaactcgtgattgttgaaatcaagtagcattccttcaaaatgggattccaacacccgtcctttgaagtcactgagacttctcagcgaataagtatagactttggaacgtgtgttttgcgtcattaccagtccgttcttgtcatcgagattggtcagactgaacgcattcttcggcaggtcatcgaagaactttttcttagctttcagataattctctactgtcttatgatagtccagatggtcacgggtgagattggtgaagatacctccagcgaattttaatccactgatacgcttctgtgcgatcgaatgggaactgacctccataaaggcgtatttacatccttcgtctgccatccgtcccaataaacggttcagcgtgatagggtcaggtgtggtgtgctccgttggaatcggctcgtcatcgatataattgcagactgtagagataagtcctactttatatccgaaatagcggaaggtattatataataaggtagcgatggttgtttttccattcgttccggtgacaccgaccaactccagtttggaagtcggatctccatagaaggtagtggcaatcttacctaccgcgtcctcgctgtcttttacttgtatataggtaatttcctccaccggtttttcgggcatatcctcgcagaggatagcggtggcgcctttactgatggcggcgggtatataggcatggccgtcggcttgcgtaccgcgcatagccatgaacagttgtccggcttctaccaaacgggaatctatgttgattccggcaatttctatatttgaatctccggctatctgtaccggttggattgctttcagtagctcatttaataacattactctatttgttttttaatcattcactattttagcgtaagcgtcactgtctgtccttttctaacaatgcttccgttggctatcgactgactttttaccttgcccactccgacaagatgcactttcaaccctttactttccagcaggtatacagcgtctttagctcccatacctatgacactcggtacaaaattctgcatattgctccgactttccagcactacggcttgtggagccaggtgggtatttccccacacttcttttcctgcgtcggctattttaccttgcacctgaatattcagttcttccaatacccgctgagcttccctcatctctccggcttttacgttcggaatgactacggaattcgtatcaatcgcattggtgagtggcaaacgtaagtctttggcgtatactctttcggcaatcctgctgaatacgctacctgccatcaaacctcctgaggctggtagtcccggtttctgaatggaaacaatcatgctatatttaggatcctctgacgggaaataaccgcagaaactgactagataattcgttctccccgtcttgtatccggctgctccctgtgagatttgcgctgttcccgtttttcccgaaacatggaactgtttgcttcctgccggtttggcaagtccttcacctactactttacgcaatatcatctgtatgtctgccaatgttttgtccgaacatatcttcggattgataacttcggtcggatattcttttactatctctccgtcttttatcgctgcttttacgaacttgggacgcaccattacgcctttgttggctattgcattgtaaaaagtaacgatgttcatcggtggtacttgtgtctcgtaaccgatactcatccatggcaacgcggtctttgaaaaataacttctctctttggggccccgaatgttcggcttcccttctccggctatctgcagatggagaggttggtcaatactcatccgttttagtccgtcgacaaacttctgcggattgcttccgtagaagtggtctatgatatacgatgtacccacgttggaagacactcctaatatctcggtgacagttagtttgccgtatcctccgcgatgccagttgtggtccttcatcacgcgaccatgcatcggcatttgcccgttgcctgtatccactacgtagtcgggagtgatttttccatcttcaagagctaccataatggaggccgtcttgaaggtagaaccgggctcaagcatatcgctgatggcgttattgcgcatttcgtaatattctccgtccttgccctgcatcatattgacgattgcttttacttctcccgtagccacttccatcagaacgactacaccaacacttgcattcaactcttttagcttgtctaccaatgccttttcgcaaatatcctgcatacccacatcaatagtagtgaggaggtcgcaaccgtcaaccggtggtacgtctactatattcaggtatttattcatcactttctggcgatgtgtcagtccgttccgccctttcaagatggtgtcaaaagccaactctatgccatttctggctccttttgccgtatcggcataaacatctcccaacgtacgtgctgccaacgagccaaacggttttttcctctgattgtaggctaactccttgaatcctcctttgtatcggttcaggcagaacacaggcaatctctttacctctttatattgtatataggagatgcgtttcgggtaaatcagatagttacggctcttagcctggcgcccttttttaagatgtgccttgaattgagcgacactcttatccgggaaaatcttgttcagtccgatgcagattgaatccatgttggcattaagaatggagtcgcgtctggcctgatctttctttcttcgtttttcgtccttctcaccggacataaagtccatatatatcctgtattcgggtaaggaactggccattagtttaccgtcggaggaaataatgtttccacgattaggcttcaccgttacgttctctttcacgaaacgatcggctacgtcctgccaatactgacgctcggcaaacatagtgattcctgcctttacgacaattgctacacctatcaacgccatcacgaggatgacgaagaaatagcgggtcattatattctttttattaactgccacagtgcttgtcttttaaaactcccagatctccacctatttaataaggtaaggagggttggtggatgtctgcaaatcactctccttactagaaatatagtcttcgatacgtgactggcggctcttctccatcagttccgagctacgtgtcagcgcatcgtattttatatctatcagttccttttttaaccggtctatctcgatctgctgttgctgactggcatagcggttatggatgtagaagatgatgaataccatgatcagtaccagcaacttcgtctgacggcggaaaaagtcggtagccagaatgtccccacccagaatactttttagtgaggtgcgttttttcttttttccctcttctgttttcttatttactacttcctcttccatttctctttatttcttttctgcaattcgtaatttagcacttcttgaacgcggattcctttctatttccgtttcgtcgggaacaatcactttgttgttgacaaggcggaagggggtattcagattcccgaagaaatcgctttctgcttttccctctacatttccggttttcataatgtttttcaccatgcggtcctccagtgagtgataggtgatcactactagtctgccacccggtttcaatgcttctgttgctgccagtaacatttctttcaatgcttccatctcttggtttacttcaatccgcagtgcttggaatacctttgccaattccttcttttccctttcgcgaccaaaaagtggcttgatgacttccaaaaactctccgatggtacggatagcctgcccgttccgtgctttgacaatcacagacgcgagtttacggctattttttaattctccatagagatagaaaatgttggcgagtcgttcctcttcgtaagtgtttacgatatcggctgccgtaagtcctgcacgtttattcatgcgcatatccagatctccgtcgaaacggaaagagaaaccgcgttcactgtcatcaaaatgatgggaagacacacctagatctgctaaaatcgcatctacttgctctatatcgtgataacgcaggaaattgtgcaggtaacggaagttgctgcgtacgaaaataaagtggggatcatcaacgatattccgttcggcgtcttcatcttggtcaaatcccaaaagtcgtccgccttccccgagccgtgaaagaatctctcgcgaatgtcctgctccaccgaaggtaacgtctacatacgttccgtcagggcggatgttcatcccgtcaacgctttctttcagcagtacaggcacatgatatgtcagttcatctttctccatcttgtttgttttcatcgttcataatttcttctaatgccgctccgaactcttcgggtgacataaacggctgttctgcccgctccttcgaccagatctctatcttgttgtcgatgccgatgaagcgtatatccccatgtatattgcagatctgtaaataccgcttggggattaatatgcgtccgttgctgtctggtgtcaccacctcaacgtcgctcacaaactgtctgaaaatgagttgatgcttattgttccacttgttaagtctgctgcgaagttcgttcaactcctcgttccacacgccctctgggtatagagtcaggcagtcttgaaatacgtctttgcgcataataagcctttcttcagaagcagcttgtaattgcttcctgaagatagcgggaatgaacactcttcctttagtgtctgctttggcttcaatattacctaaaaaacgtatcattaccttattataataagagaccgtaaaagtatgaaattccccacaattccccacgattttccacaaaaacttttagagaagttttcaacagagtgttaaatgttgatttacttgaaaaaaagagctccgagtgtcggtatgttcaacactcggagctcgtacaatttagtatctttttagttaaggtctagcgaaagtctttcaggtcttcctgcaatttctggcgtgtgaagaagatgcggctttttactgtacccaaagggaggttcagtttctccgcaatttctcggtatttgaatcctgaaacgtgcattgcaaacggaactctgtattctttagggagtttgttgactacccggtgcatctctttcaggtcgtatgctctctctgtactttcataacttgtatcttgcggcaagttcaggtggtataagttgtcggtttggtcaacaaatgtttgatcgcggactaccttgcggtagttgttgatgaatatattgcgcatgatggtgtacatccatcctttaaaattagtatcaggcatatatttatcttcgttatctaatgcttttaatgacgtctcctgcaacaaatcgtttgcttcttcacgatcagttgtcagtttgtaggcgaagcggaataattcttcttgtactcctactaaatcttttctgaagcttaaacttttcatactgtgttgcttttaaattgtgaatattcgttcgtaaatttcgatgttgcaattttacggtattttcaggaatccgatgggggaaaatcagactgaatttgacctgaaaattgtcagctgatagtttttaggtggtatttgatagtttttgggtgctatttttttgtgttatgaactttaatcctgcattttctaccaaattattgcgattaataaaaaagaaccgttaattttgtgccatcatttttatttgaaaagaatgactgatgactctttatttttgattgatgtcgataagattcttcggacaaaagctccgaagcaatataagtacatccctaagttcgtgatttcttatttgaagaaaattgttcatcaggatgagatcaatgtattcctgaatgaatcgaaagataaagtaggggtagacttcttggaggcatgtatggactttctggatgcgaaggtggatgtgaaaggtatcgaaaacctgcctaaagacggattgtacacctttgtgtccaatcatccgttgggagggcaggacggtgtcgcgcttggttatgtgttggggcggcattatgacgggaaggtgaaatatctggtgaacgacttgttgatgaatcttcacggattagctccgctttgcatacctattaataaaaccggcaaacaggcaaaggatttccctaagatggtggaggccggatttaagtccgacgatcagctgatcatgtttcctgccggtctctgttcgcgtcggcgtaatggagtgattcgcgatctggaatggaagaagacatttgtagtaaagagtatacagacggaacgtgatgtgatccccgtgcattttggaggtcggaactccgatttcttttataatctggcaaatatttgcaaggcattgggtatcaagtttaacattgctatgttgtatcttgcggatgaaatgtttaagaatcgccacaaaacttttactgtcacttttggcaaacccataccctggcagacttttgataaatcgaaaactccggcacagtgggcggagtacgtgaaagacattgtatataaactgtaactgatagaacaactataacaagaaatatggaagagattattaaaccggtaagcaaagagctgctgaaggcggagttgacggaagacaaacgcttgcgaatgacgaataaaagtaataatcagatttatattattacttatcagaatgcacccaatgtaatgagggaaatcggtcgtttgcgtgaaatcgcttttcgtgctgccggtggaggaacggggctgtcgatggatatagatgaatatgacactatggaacatccatataagcagttgatcgtatggaatccggaagcagaagaaatattgggcggctatcggtatttgcttggaacggatgtgcgtttcgatgagaaaggcgctccgatcctggctacttctcatatgtttcatttctcggaaacttttattaaagaatatcttcctcagaccattgaactgggacgttcgttcgttacgctcgaatatcagtctacacgtgccggtagcaaaggattatttgctctggataatttgtgggatgggttgggcgcgttaacggtggtcatgccgaacgtgaagtatttctttggaaaagtgaccatgtatcctagttatcatcgtcggggacgtgatatgattctttatttcctcaaaaagcacttctatgataaagaagaattggttactccaatggagcctttgaagtcggagacttccgaagaagagttgaaggctttgttctgtaaggatactttcaaggaggactataagatattgaattgtgagattcgcaaattgggatataacatcccgccgttggttaatgcttatatgagcttgagccctacgatgcggatgttcggaaccgccatcaactatgaatttggcgatgtggaagaaaccggaatcctgattgcggtagatgaaatattggaggataagcggatgagacacatccagacgtttatagaaagccatccggatgcgatgaaaatgccttgtgataatgatgaagcattcgctccgaaagtcgttacaccgcaggcagactgttgccgttaattttacgataaagatcaagagcgaagacatcggtcatacccgatatatagtcaagtaccgcctgtattctttcatagagtgcaggcgcttttatattatactggcttgaaacccgattgatgagcaactcggaataggcctttccgggagaggttaccgcatctatcatcagttccagcaaggtactgatgacgcggaaaccggctaactcgatgtccagtacatcccttgaccggtagatctttttcagggatacttcggcgcagtgcttgtatgcgtttgccggacgctcggatatatgtttgataagcgctccttcaaaagtgccggatagaatttccgcttcgtgctccagaaatacacgggtacattcgcgaatcagtaatccgatgacggaagaacgcagataagcgatttgctcattcgtgtcgctgacaatgaggaaggtttgtcggatgcgttcccggcgttcttcactgaaataggccattaacagttcctttgtctcttcggtagtgaggattttcagtttatgcgcatcttcaatatccatcatttgatagcagatgtcatctgcggcctctaccaagtagaccaatgggtgacgtgcatatttcaacggatgttcattaagtaaggttaatcccaactcggttgctatcttatggaaactttcttcttcgctgacgaagaatccgaatttggattttgtgccggcaagacttgatgaaaaggggtatttcacaatggaagccaatgtcgtgtatgtcattgcaaatcctcctttccgcctaccttcaaattgatgggtcaggagtcggaatgcgtttgcgtttccttcaaaatgtgtcagatcttcccattccatcgtagaaagttgctctccgtccggctgtatttctttcaagcggagtcctttcccttcagagaagaatgtggatatagcccgctcaccggaatgtccgaagggaggattgcccaagtcatgcgccagacaagcggcggagacaatagaaccgatctccggtaaaaaggattcttgaagctccggttggcgttgcaggatggctttggctacatcattgcctagagaacggccgacacaagaaacttcgagactgtgtgtgagccggttgtgtacaaagacactgcccggcaggggaaatacctgcgtcttattctgtaacctgcggaaaggagcggagaagatcagacggtcatagtcccgttgaaattccgagcggttctcctgtcgtacttcgtggaattcttccattccgaagcgtttagctgatattaattggttccaattcatggcaaatgtgtgcattatttattatttaactgcaaacttaactatttttcagttcaaaatgtgtattttcgcctgttaatatagtaaacgtgtattttatgaatattcaagttatcaataaatcgaagcatccgcttccggcttatgccacagaattatctgcaggaatggatatccgtgctaatctttccgaacctattatattggaaccgttgcagcgttgtctggtacctaccggattatatatagctcttccgaaaggattcgaagcacaaatacgtccccgtagcgggctggctatcaagaaaggaatctctgttctcaattctcccggaacgattgatgcggattatcggggggagatttgcattgttttagtcaatttatcgtccgaagcgtttgtgattgaagatggagaacgtatcgcccaaatggtgatagccaagcacgaacaagccgtgtggcaggaagtggaagtgcttgatgaaacagaacgtggagccggaggcttcggtcatacagggaaaaaatgaaaaagataatactattcttgctgataaatgccttactgtttcctctttgcacgactgtgcaaggtaaaaagaaaaaggtgaggaaggaggagaaaactgttgtactgcaactgacggaagagcagcaacgtaaatatgactatttctttcttgaagctatacgaatgaaggaaaagaaagaatatgctacggcttttggtctgttacaacattgtttggaaatcaacccgaacgcttcgtccgccctttatgaaatttctcaatattatatgtttctccgtcaggtacctcagggacaggctgctttagagaaagcggtagcttatgctccggacaattattggtatagtcagggattagtcagcctgtatcagcagcagaatgaactggataaggctgtgactttgcttgaaacaatggttactcgttttccggtgaagcaagaccctttgttcaatttacttgatatttacagccgtcaggagaaatataatgatgtgatttccacattgaaccgtttggagaaacgtttgggaaagaacgaacagttgtctatggagaaattccgtatttatcttcagatgaaagatgataaaaaagcattcagggagatagaaagtctggtgcaggaatatccgatggatatgcgctatcaagtgatactgggggatgtatatctgcaaaacggaaagaagcaggaagcatacgaagcgtaccaaaaggtattggctgtggaaccggataatccgatggcgcttttctcgatggcttcctattatgatcagactggacagaaagaattgtatcagcaacaattggacacattattgctgaataagaaagtggcgcctgatactaaaattaatgtgatgcgtcagattattgtggagaatgagcaatcggccgctaaagacagtacccaagtgatagccctgtttgatcggattatgaaactggaccaggatgatccgcagattcccatgctttatgcacagtatctattgtcgaagaatatggaaccggaagcagtgcctgtattggaacaggtggttgatttagatcccacgaataaggctgcccgcttgatgttggtcagcgctgccgtgaaaaaggaagactacaagcagattataaaagtctgcgagccgggcattgaagctactccggatgcattggaactttattattatctggctattgcctatcatcaggcagagcagacagacagtgtgttgagtatttgtagtagggcattagagcatattacacccgatacccgaaaagaggtcatttcggatttctattcaattatgggggatatctatcataccaaaaagcaaatgaaggaagcttatgctgcctacgattcagctttggtgtataacccttccaacatcggtgcgttgaataattatgcctattatctgtctgtggaacggcgtgatttggataaagcggaagaaatgagttataagaccgtaaaggcagaacctaataattcgacttatctcgatacgtatgcctggattctttttgagaaaggcaactatgctgaggctcgtatttatattgataatgcaatgaagagtgatggagggaaaagtgatgtgatagtggagcattgcggggatatttattttatgacgggtgatgtggaaggcgcactgggatattggaagaaggcattggagatgggtagtgagtcgaaaacattgaagcagaaaatagaaaagaagaaatttatagcagaatgaaaagaatagtttatctattgttggttgtggttgtgttggctggttgtaagagttcgaagcgcctggtgacttcggagacaaaggcacctgtatccagttatctggcttccaagctccaactgactattcccgataaaaaaggaggaagcctgtcgataggaggaaccatgaggatgaaaactcatgagcgggtgcaaatctctttgctgatgcctattctgcgtacagaggtagcacgtatcgaagtgactcctgaggaggtattgttagtggacaggatgaacagaagatttgttcgtgcaagtaaagaagaactgaagggtatattacccaagaatgcggagttctctcgtttggagaagatactgacagatgcgtctttacccggtggaaagacagaactgacaggaaaggatataggaatttcttcgttggaaaaagcaaaggtgcaactttatgagttctctacgaaagagttttctatgactccgactgagttgagttctaagtacaggcaggttcctttggaagaattaataaaaatgttggtagctttgttatgatgaaacgtttttttgttattcttatcggttgcctttggctggcagttccgcttttcgctcaatcgaacaaactgattcgtgagttggagagcaaacgtggtgcgctgcaaaaacagattgccgagtcggaaacgatattgaagaatacaaagaaagatgtaggtagtcagttgaatagtctggcggcattgaccgggcagattgaaaagaggaaacgttatatcatggctattaacaatgatgtagaggctattgagcgtgagctggcttctcttcaacggcaattgaggagcttggaaaaagatttgaaagataagaaaaagaaatatgaagcttctgtccagtacctgtataagaataaatcgatagaggaaaaactgatgtttattttttctgccaagaacttggggcaaacttatcgccgtatgcgttatgttcgcgaatatgctacctatcagcgtttgcaaggagaagaaatcctgaaaaaacaggaacagatacgtaaaaagaaggcggaacggcagcaggtaaaggctgccaaagagaatttgctgaaagaacgtgaaggtgaaaaagtgaagttggaagcacaggagaaagaaaaaaggattttggttgccaatctgcaaaagaaacaaagaggattgcagaatgagattaataagaaacggagagaggctaatcaactgaatgcccgtattgacaagctgattgcggaagagattgaacgtgcccgtaagcgtgcacaggaggaagcccgtcgtgaggaggcggctcgcaggaaggcgcaaggcaaggaaggacaatcggctggaaccggagcgaaaacgaagtcgaagcctttggaggtgtatacaatgagtaaggcggatcgggagctatccggcaattttgccgccaatcgtggaaagcttcctatgcccatatccggtgcttatatcatcaccagccattatgggcaatatgcggtagagggactacgcaatgtgaaacttgataataaaggaatagatatacaaggaaagccgggtgctcaggcacgtgccatctttgacggaaaagtggcagccgtattccaactgaacggattatttaatgttcttatccggcatgggaattatatttctgtttattgtaatctgtcttccgcttctgtgaagtccggtgatacagtgaaaactaaacagcacatcggagaggtcttttcggatggaacggataatggacggacggtgttgcatttccaactgcgtcgtgaaaaggagaaactgaatccggagccttggctcaatcgataaagtgatagttgaagatactaagagtataacgagcggacttctgtattaaagcagaagtccgtctaataattccagatatagtccgatagcttcttctatctctttcagcataatatattcttctgccgtatgtgaacgtgaagaacgtcccggtcctatttttaccgatggaaaagacattaatgcctggtcggatagagtaggggaaccgaaaggaatacgtcccatttttattgctttttggacaaacggatgtttctcgtcgatccgtgaggagttgagacggaacgagcgggctttggcttcgcaagagatatgtttcttgatttcagcaaataaatcttcattcgagtaaagctcgttgctacggatatcaacaacgaaagtgcacttatcgggaactacgttgtgttgagtacctgcattaattacagttacactcatttttaccggtcctagtaactgcgattctttatcaaagcgatagtcgcggaaccaggcaatatcattcaagaccttataaatggcattgtctccttcgttgcgtgcggcgtgtcctgccttgcctgtggcggtaacgtccaataccataagccctttttcggcaatggcaggttgcatctccgtcggttcgcctacgatggcgaatgaaatgggggggagtccaggtaatacactttcaattccgtctttgcccgatacttcttcttcacaggaagcaagataaatcaaattatatctctgtgaagtacgacatagttgcagaaacacctgtaatagagatacaacacttgcgcctgcatcgttgcttcccagtccatacaattttccgttctcttcacgtggcgtaaacgggtctttccgccagccgttgacaggtttgacggtatctatgtgggaattgagcagtatagtcggcttcttcaggtcaaacatggggctaaagcaccacacattattacccttgcgcccggtctgcataccttccatttcaatataattttgcaggaagtctgcggcttgagtctcttcccggctaagagaagggatactgattaacgatttaagaaggcttgtagcctctgctgccatagtcggaatatcatatttcatactgcaaatattttgtctattacttaatatttgcacaaagatagtcgttttgcgcaattgtttcaaataaaactaatacctttgtaccatatttactaatacaaagagtatgacttatcatcatttatctgtcttagtccatcgtcaggctgaaaagtatggcgacaaggtagccttaaggtaccgtgactatgagacagctcaatggattccgatcacctggaatcaattctccggaactgtgaggcaggctgccaatgcgctcgttgcgttgggagtgggagaacaagagaatatcggtatcttttcgcaaaacaagcctgaatggttttatgtagattttggtgcattcgccaatcgtgctgtgaccattccattttatgcgaccagttcaccggcacaagcacaatacattatcaacgacgcacaaatacgctatctttttgtaggtgagcaatttcaatacgacgctgcattcagtatctttggcttttgcacctcactgcaacaactgattatctttgaccgttcggtcgtaaaagacccccgtgatgtgtcgtccatctattttgatgagtttatggcgatgggagaaggacttccgcacaatgatgtggtggaagagcgtacgggacgtgcttcttatgacgatttggctaatattctttatacgtccggaacgacaggtgaaccgaagggagtcatgcttcatcattcttgttatttggaacagtttcgcactcatgacgaccgcctgactacgatgtcggataaggatgtttctatgaacttccttccattgacgcatgtatttgaaaaggcttggtgctatctctgtatccataaaggggtacagatctgtatcaatctccgtccggcggatatacagacaaccattaaggaaattcgtccgacattgatgtgcagcgttcctcgtttctgggaaaaagtgtatgccggagtacaagagaagatcaatgagaccacaggaatgaagaaagcattgatgttggatgctatccgggttggtaagattcacaatcttgattatctgcggaaaggaaagacgcctcctgtgatgaaccaattgaaatataagttctacgaaaagacaatttattctttactgaagaagaccatcggtattgaaaacgggaatttctttccgactgccggtgctgccgtacccgatgaaatcaatgaatttgtccattcggtaggcattaatatggttgtcggttatggactgacagagtctacggctactgtgtcttgcacattgccggtgggatatgatatcggttcggtaggtgttgtattgccgggagttgaagtgaagatcggtgaggataatgaaattcttcttcgaggtaaaaccattacaaaaggatattataagaaagcggaagctacggctgctgctattgattcggacggatggtttcatacgggcgatgcaggctattttaagaatgggcagttgttcctgacagagcgtattaaagacctattcaaaacttcgaatggaaaatatatcgctccgcaggctttggaaacaaagttggttatcgaccgttatattgaccagattgctattattgccgatcagcgtaagttcgtttctgctttgattgttcccgtatatggatatgtgaaagagtatgcgaaggaaaaaggtattgagtataaggatatgagtgaattgttgcaacatccaaagattgtagggctgttccgtgcgcggatagaaaccttgcaacaacagtttgcgcattatgagcaaatcaaacgtttcaccttgcttcccgaaccatttagtatggagcgtggagagcttaccaatacattgaaactgaaacgttcagtcgtttctgaaaattataaagacctgattgagaagatgtacgaggagagttgagagccaggcttgagattcgatgtgagataagtgtacgattataatttataacttttaatttctaatttaagaagatgattactattgaacaacttaaagacgtgaaagagcgcacggatgcgctgaggaggtatctttgacgtcgacgggaagaaaattcaagttgaagaagaacagttaagaacgcaggctccgggattttgggatgaccagaagaaagctgaagcccagatgaagttggtgaaagacctgcaaaagtggattgacggctataatgaggtcaaaacgctggcagatgaacttgagctggcatttgatttctataaagaggaactggtaacagaggaagatgtggatactgcttatgcgaaagcgcgtgaggcggtagaagcgcttgaactcaagaatatgcttcgtgatgaggccgaccaaatggattgtgtgttgaagatcaattccggtgccggtggtacggagagtcaggattgggcttctatgttgatgcgtatgtatttgcgttatgctgagacaaatggctataaggctactattgccaaccttcaggaaggtgatgaggccggaatcaaaacctgtacgatcaatattgaaggggattttgcctacggttatctgaaaggagaaaatggggtgcaccgtctggtacgtgtctctccttacaatgcacagggtaaacgtatgacatcttttgcttctgtctttgtcaccccgttggtagacgacagtattgaggtgaatattgagacggcacgtatctcttgggatactttccgaagcggtggcgccggcggtcagaatgtgaacaaggtagaatccggagttcgtctgcgttaccaatataaagatccttatacaggtgaggaagaggagattctgattgaaaatacggaaacccgcgaccagcctaagaaccgtgaaaatgcaatgcgccagttgcgttctatcttatatgataaagagttgcagcaccgtatggcagaacaggcgaaggtggaagcgggaaagaagaagatcgaatggggctcgcagatccgaagttatgtatttgacgaccgccgtgtgaaagatcatcgtaccaactatcagacttcggatgtgaacggagtgatggatggtaagatagaggattttattaaggcttatctgatggaattctcttcacaggaatcataaaatacaaaattagcaactgttatttttggaaagttaaaagatttgtccttactttgttagcgttgaactttaaagctaactattatgggcaagggtaagaaaaaagtagcgattagtaagaaggaagaagagcaggcccagaaggttgtcaaaatagtgtttgtctcattaattattttggcgctgattatgctgattgccttttcctttttcggctgataatctcaccacaggtttgtgtaatctgtggtgagttttttgtaatactactgtaaccggattgtcattcttgtgtatccttgcagttgtacttttgctgcggattaagtagcaaacaactgaaatgagtagaattacaacaacagtcgtaacattattgttggcggcaacagctttcggacaggctaaagaagacgccggagatggcaaaaaattagataagcagacgatggaatggaaagactatttgcccgagattcacggaacgattcggggaaaatacgaattccagacagaaacagaggaaagtcgttttgaagtacgtaacgcgcgctttagtgtttcgggaaatgtgcatcctttggttgcttataaagcggaaatcgacctttctgacgagggctctattaaaatgctggatgcgtatgcacgtgtctttccgatgaaagatcttaatttcacgattgggcaaatgcgggtaccttttacgattgatgctcatcgttctcctcaccaacagtattttgccaatcgttcattcatagccaagcaagtaggaaatgtccgtgatgtcgggttcactgctgcttataaacatacgagtggcttcccgtttattcttgaggccggattatttaacggttcggggcttaccaatcagaaagaatggcataaaacattgaactactcggttaaagctcagttattgcctggcaaaaattggaatataacactcagcacccagatgataaagccggaatccgtacggattaatatgtatgatgccggtatttactatcaaaataatcgttttcatattgaagcggaatatctatataaaatgtacgggcatgagacgtttaaagatgtgcacgctgtgaatagctttgtcaattacgacttgcctttgaagaaagtattcaataaaatttcttttcttgcacgttatgacatgatgacggatcatagtgacggcaaaatagataagacgacaaatgccttggttataaacgattatgcacgccatcgtgtcacgggtgggatcacacttagcctttcaaaagctttcattgccgaccttcgtttgaacttcgaaaagtatttctataaaaaaaccggtatcccgaaagaatcggagcaggataaaatcgtaattgaatttatgacaaggttctgatttttatgattacttttgtggcatggcacaagaaatagaacgtaaatttttagttatcggagagtataagtcgttggcatttgcgaaaagtcgtattgtgcagggatatatcagcagtgctcgtggaaggactgtccggatacgtatccgggatgataagggatacctgactatcaagggggcttccaacgcttccggtacaagccgttatgaatgggaaaaggaactgtctttgccggaggcggaagaactgatgaaattgtgtgaaccgggaattattgacaagacccgttatctggtgcgtagcggcaggcatatatttgaagttgacgagttttatggtgagaatgaggggcttgtggtggcggaagtcgagctggcttctgaagatgaggcctttgtgaagccggactttatcggtgaagaagtgacgggcgatatacgttattacaattcccggctaatgaaaaaaccgtataagatgtggtgaacgttaacaaataaaccgtatatttgttcttataataaaaagggtagtatatggaacagttatatggttatgtgccacgagaattggttacctttattctggtgaccttattctctttgttaatcggactctcacagcgccgtatcagtctgaagcgtgaaggggagacaactcttttcggtactgaccgtacatttactttcatcggtatattaggctatcttctttatatattggaccctacggggatgcgtttgtttatgggaggaggcgccgttttgggactgttgctgggactgaactattatgtgaagcaggctcaatttcacgtttttggcgtgacgactattattatcgccttaatcacctattgtctggctcccattgtgtccacccaaccttcctggttttatgtcatggtgattgtgacggtacttctgcttacagaactaaagcatacctttacggaatttgcccagcggatgaaaaatgatgaaatgattacgttggcaaagtttttggctattagtggtattatattacctatgcttccacataaaaacctgattccggatataaatctgactccttattctatttggttggcaacagtggtcgtctcaggtatttcctacctttcttatttgctgaagcggtatgtgtttcatgaatccggtactttggtgtccggtattataggtgggttgtatagtagtacagccactatttcggtacttgcacgtaaaagtcggaaagcttcggagcaagaggctacggagtacgtcgcagccatgttattggcggtcagtatgatgtttttgcgttttatgatactgatacttatttttagcagggaaatctttctttctatttatccgtacctgttgataatgtcagtggtatccgcgatagtaggttggtttgttcattcacggcagaaacttcctaaagatacttctgtcgagtcagaagaggatgatagcagcaatccattggaatttaaggttgcgttgatctttgctgtattatttgtcgtatttacggttttgacacattatactttggtttacgccggtacaagcggattgaatttgctctcttttgtatccggtttcagcgatataaccccttttattttgaacttattgcaaaatacggggagcgttgccgtactgattattacagcttgcagtatgcaggcgattgtaagtaatatattggtgaatatgttttatgccttattttttgccgggaaaagaagtaaacttcgtccttggattttgggaggcttcggagcagtgattgtctgcaaccttgttttactattattcttttatctttaaaaaagtctccttttttctatttgtcatacaaacatcttctttttcgtttactttctgctaatgaaaagattgaaaaacttcttttttcttttttcttttttctttttgtgttttattaaaaagtttgttttatatttgttatcttgcgatatttaatttacttttgctgctgattagcattgtattagggaacaatgtagaacaaataagcaaaaacaaacgcgtaagacgcaggttatgggaaatgagggcgaagggcatagtgctttccttgtacaaggaaagccggtgtcgtttatatgtaagcacaaaaagatttggcatatttctagaataaaactactattttgtgtgttgtttttattcttttcctttttaggagtagaatgttatgctcaatcttctatgcgtaagaaggcagtggaaaataaggattccatcatgccttttaagtctcgatgggcatttaaaacaaatgctgtcgagtggcttgtattattacctaatgttactgccgaattcgatttgttcggctctccttacaaacactacacattaagtctcggtatcaaaggcaattggaatacttctcaaaattataaacctagcattgtatataatctggttgatgcccgtatggagttccggaaatatttccgtactactcaacgtaacttccatcatctggattctgcctctttctttcaacggatgaaagaggaagtgttcactattaaacgtttccatcctcgttattggcgtgcctattattggggggtgtatgctgacgttgctaattataattttaaatttggttcgacaggaatgcaaggttctgcttacggtttgggtgtatccggtggattcagtattcctttatatggttatcgccagaacttcattgatttggagttaggtgccagtgtcggatttgtatatactaaatatgatgcgtataagcatgatgctgaaagtaattgttatcctcgcttacctgaaaaaagtaagggaggtcatttagttcctttcccggttgtcagtgatttgcgggtagcttttgtttatcgtttctctacttctgtcaagaacaagtataaactaattgattatgataagataaatgcgcgtgcggaagctaagcgtcaaaagcaattgaggcgtgattctattagtgaagcacgggatagggcgaaacatctgaaagagttgcagaaagactctatacgattggcaaaagaagctttggatcatataaaggactcacttaagagacaagataagttgatgaaagattctttggaacaagtgaaaaagttggagaagaaaaattcaaaggaagagaaaaagcaagctgggaaagtagtggaaacacctgagatacaacaatcaacggaggaacagcaacctgctcaggagaaacagcctgctaagtctgactcgcctgaaccgcaggccgtcgaaccacaatctttgaaagatcagggaatcgtgccactaacgactaatgagggaggtgaagcgtaatgaaagtgactgttatatatcaaattctattggcttccttgcttttggtcggttgtacaaaggtagatctgtgtgatgaaactacacatccgcacgtggtggacgggttctcggttacatataattggaatgaactgggcttatctgccaatgaaacgcctgagaaactatattttgtagctactcgtatcttgaatacacgccatatagtttatcagacagataaagatggaaactttaaagtggagaagagcaaagaagaaacggcaataactcctgatgacggaaatactgaaacttcgggtgatggctcaaccactcgcgacaataccgacatcacgactcccgatgaccagtccgaacctcagagtgagtatcagcctgatatcaagcttcctggaggtgaatatgtgatgatggcttttactgatccggcatatccgatggtgaagaaagagaagaaggatgaggacgggaatgttgtaaaagacatgaatgataatatcgtcatggaggaagtgaaagatacgagagttgaattgcataatttggatgaattcaaggaaaacgatgctgttcacatgaaagaagtaaaaatgcgtcatcatgcattagagagtgttacggatattgttcatgatacatggaaggatttgaatcccggcattgaacatgtatgggaggcaggtcgtagattaatcatttcccgttgtgattatctggaactgaatgcggggaataattatgaacaaccattcaatttcacctctttaactcagcatattgatattaacttttacctggacttggtagaggatggagagggtgaagataaacaacagctgaaaccggaagatatcaaatatatttttgtcgaaatgtctggaattgtaccggaaatttctctttctaccggattgttgaatacttcatctttgaaaagggtgattgtgaaagtgcctgttcctactactggagaaactataacggaagaaagtggcaagaaatgcaccaccttgaaatgtactgcctctatggatgtgttcggtttagtcggtggtatggataattatgcgattatgggaccgggagtttgctgtctggctctttcagtgaagaccggaacaaaagaatttatttctaacggtatagccaatctttccagaaagatcaaggaattaggcttgaccgaagaaaccggacaggtgaatgagcgaaggagactgaaagatagcggtgaattgactattgatgtccatttacgtatcactccttccggtgcacaaggtggagcaggtagtgatggagtaataggctgggacgatgtaacgaatgagattcatgtggatatataaaagtatgatggaaagaggtcaaacatatataggcgtaagacaggtcttgtgggtaggactttgtatgttgctgctgtgcggttgttccagaggtacgtatgtgggcgagttaccggaagatgacgatgcacctttgacggagaatattcctatcgttttaggttttggtgtatcgagctttgatatattgacgcgtggaagtggagctgtcgagagtggaacaaatttagaattttggaagaatgcgaagttctacgtttatgcatttaataagaatgtagaaaccgatttgtctgttcgttggagtgaggcaaatgaagacatttgtttattggatgcaaacagactttcggaagatgggggacaatcctccagccatgggaaagaggttcgggtaaaggttgataattcgaacttaatgccattctttcctgatgataaaacaggctcacaggatatttactataatatgaagcatacggattggccgtataacttctttgcttattatctggatgatttggatttaacacaacttcaatgcgttcgggagaagaatcgtatttattatgatgtagagttggatgggcgtagggattttatgtcttctgtggccaatcccaaattgcaggaagataaatatgcaaataatccctataaacaaaaaatcatggaccgtgcatatagcgcctattctgctagtcatggtttgaatccagtgtttagttttcagcaccatttggtacgtctgcgatttgtaatctgccgtccggaggagggtggaagtgtaccttctatcaatgaaagtttggttgtaaaaaaggttagtgtaaaatctaaagttcggggacgttttaccgttgctgtcaatgatatagatgcggatgatgcaggaaaaactcatgtagggctatcttttaatagagaagactacgcgtcggaggaggcttatgcgaatagtgaagactatctgtacttgttgaaaaagaatggtgaggagatagggagtgacggatggtgtcgggtaattgactgcaagaagtattcagagttaagtgcggaagataaaaagaagccttcttttttaggaaaagaagatgagaatgataatagcggtgccagcttgttattagcgcctgctactacttattcggcacgtatctttttggatgaagataagtcgagtgacccgggacatggatttgtagatgttgatttggagcctggtggaggagttggttttgtagcaggtggtgcgtatgtaatctatttaacaattaatagtttatctgatattaaacctaatgttgaaatcggcgaatggacaccgggtggagaaactatattagatccggatggggaatttgaagataaataaaatgtgaaattcaaatatatttattaatttaaattgtattatttatgaaacgatttcttctttatgcaatgatgacagccggagtgttggcgtcttgttcacagggtgagaatgatggtttacctcaaggtgattctgtaaatggaggtactgatgcagctcctattctattgtcggctgtagctccttcagcttctgttgaggcttcgacaagaagtgcaggtactgttggtgggaaaggtgacgctaatgtttggagtggtcaaagattgcatatttttgcattccaaaaagacgcaactactggtgaaacttatggtgataaaattacaggtgataagactttctttgataagattggtattgctgccagtgacaatgaaaccgtagttaaatgggaaaatgatcagactttatatttccctcgtagtggtgcttatgatttctttggttactatgcagatgatgcattgggagcaaatccaacttatgaaacaggaacaaatacattatatgcaaactttacaattgatggctctcaggatcttatgattgctaaagcaaaattgtcaacagaacaggaggctgcacttggcgatgacaagtataaagcatatagtgcatatactgctcgtaaaggatatcaaccagcaatgacatttgaacacttattgactcgtttaacttttaatatacaaggtatgggcgatcaaggtccggaaaatgtatatgtaaagagtattcgtgttaaatcaagaaatacaggtaaattggtttttgcttatgtaacagatactgataagggggctgtttttgaccaatttacaccggagactctccctttcttatatctgaaagagagaaatatgcaaggtgttatgcaggcattggacgcagacattactttcacagaggctgacctgactgaggatataaaagatttcaaaggtactatcggaaaataccatgcgtctgcaactggtgctgcaaatgcgactcccgtaggagaagctttgttggttgaaccgggtgtaacatcgtatgcccttgaagtggatgttgtacaatattataataaaaatggtaagataataacagatttaactcaacgtgaaaatacttataagttgaatttggacattgctaaagttgctcctcctaaaggtgaaccgactcccacaatatttgaagcttctaaatcttacgatgtaactattcaggtacatggcttaactgagataactcttgctgctaaattgggcgaatggaaagatggaggaagtattgtgttcgatcctgataatgatttttcaaatgatgtaaaataagtaatgaatatgaaaaagaatcttttatatgtaatggcaatggccgctgttttcgcaggctgttcaagtggtgaaggttttgacgaaaaagaaggaaataatactccagtagaaccggtagataatagtgaagtcgaaatagcttttggaaaagcaactacggtgagtgcagtgcaacagtataataatactagagcagctcttggggatacctggaacggtgaacaaattggaatttggggagtagatcgttcagaaactgcagaatggaacttggttagttctcatatatttgggcaaactgatcctgtgactgctacggttgcaagtggtggagatgtgacttttgataatggcccttattactatccgatgagttctaaagttaattatagtttctattcttgttatccggtcgttagaactgctgttgctgctaggaggtcgatttcttgtccatatacaattgatggtaagactgatattatgtggggaagtgcagtttgtgaagataagatgatcgatggtgttacatactcaggttataatgcattatattttcgtaaagtggttgacgcacctgttcctgatttgaaatttcaacattgcttgactagattaaactttgtagttcaaaaaggaattgaagggggaggaaaacctgtccctgttgctgttcaagatataaaagtcttgaatgttcctactgcggctaatttaacagttgtgggagatggtgctggaaccttgacagagtctggtgcaacaggtgagttgtctttgtataatggagatactccttcttttgatacgattgttgttcctgaacttggtcaagaaaaagcattgggaacagtgctgttaatgccttcaaaaacaaaagaatatgagttggaagttactttggtagccctcgacgagaataacactcctactggaaaaccagaaaagggtattgtgaaaattaacagtaaagtcgatttcgctcctaatacccaatataaagtcactttgacagtgtatggattacagatagtccaggttcatgctacattgggtaagtgggaaaccggagaggatataactcaagaggtcaattaaacattaaaaaagtgtttatgaataaatggatattaggtgtatcggttatattatttttactgacatcttgtagtaaagataatgatgagggtacacctcaatctgatgatataatgaatggaggggctgaattgaaattcagctccgatgtcctttcgtctatcgtggttgacgttgatcctactagaagttcgactcgtgcgccattgagctcttttgagaacaactctcaaattggaatttatggaataccgggagttgatggagggaagaatgaatcatgtaatttgcgtgattgtaaatttgaatccgattttcaaaaatatttgtttaatggtcgatatacctatgtttctgggtatgacgaattacaatcggaatttcaggctacatatccatcacgagcaaatcctgctttatatttgtatgggtattatccttatacggacaaggcggaatatcgtgaaattgccggagcttctcagtgggctgttccatggcaactagatactgacaatatggctaatacaatagactatctttatacaggtgaaaaattcgttcgatattcagaatggggactcaatccaattactttggagtttcaacatgcctttggtagagtggattttaagttctatacgacgagtatggctgttcttaataagaattatactgtagagtctgttacaataacttgtatttccggtaaaaaaggttggatggcaattgccaatggaagtatgtcatttacaacagagcaatttacttctacatataaagtcgtggatggttctgtcgcatggaatataccaggtgaaccggcagctcgttttatgtttcctcatactcagacgctgataaaagaagtgacttgtgttatgagaagcggagctggagaggttaagaaatatactatttatgatcaatattccggttatacaattccggtacggcaaggagaaataacaaatatgaatgttaaattcttgccaaaagatgcatccatctcatctgcagtcgatgtaaattcatgggatagcaatacgactattgataaagatgtaaagttataataacgacatgacacgaatcgtaaaatatctgttcttctttattttgctgcttggagctggagcacaagagatgtgcgcccagcaaatagcagtgaaaaccaatggcttgtcacttttggcaggagtgcctaacttaggatgtgaacttgtagtgggagaacgctccagtgttgatttaagtttctatggaggatacaaaccttgggggacagatatcaagcttatcggagtacagccggagtatcgatattggtttaacggacgtcctatggtgcgtgaatacatcggtatatccgctttaggtgcgagctatgatatgcatctgggaaaacatatttacgatggagatgccataggtattggtataacgatgggatattcaatggtattgggaaaacgcttgaaccttgaattttcggcaggtttcggagccgtttgtttctggcaccaacaatactatgagaatgataattttgaggattatctgatcaataatccgggaaagacgaatgcgcatggatataaattgtttccagccaagttagcggtttctatttcttatattattagatagttagaaagtgagattgtagatatgaaagtaaatttgataagggtgaacggagctatgaaaatagcttttctattgatatgttatttagctacttgtgttcagttgaatgcgcaagcccccaaattagtgatgggacgtattttggacaaagaagcatccgagaagaaacgcaaacctgtcccgtttgatatttcttctattggtgacataaagatttattatttcaataccgttcaagaaggaaaggatatggaagcggcactgaacaaagacaatatcagtttgaccctttcagccatgtacgaagtacccgatgcgacgggagcttatcagattactttaccggagaccggttcattggttatcaaagtaagtacggcgcccgctgtatttgaagcaatcagtggtcgacgggagattactacgtatgtagatatgggacacatgattagtcaggtaaccgttgtggggcaacgtacggaggttacgtccatgcccgaaacgcctgatcagtatggagatatgattattttgaacggagcgaaagttgcagttcctccacgtattggaaaggacaatgcccgaatgatcgtacagccatacgtgataaataatagtaaaggaaagaaagttgaaatgtatcgtctgcctcgtgtatacgatggttcgcaatattatctgactcaggaccgtcgtatgggatatgatataacccgggattcgctggacgcttttatcattgaaaacgaacccctctcagcggagaaggcttcctatatgtggaatgatacaatcaaactatccaatgcgcaagataacttccaagtgctggctcttatgcagatggaagattatacgcgtccttattacgaacgcttgttggaactctctacccgtagccccagacgtccgttacgtttcctcgaatattcgctcgaccagtatgaactggaccctaagaaatatgaggaaaaaccgaaagttgaacgccgtaccggtgtggaagacatttctttgagcttcttactggggaaggcggaattggatcctgaagatcctaataatgaagtacagttgaataaactgaaagcgaaactgttggaggtggtaaatggcgaaagttctactttgaaagagcttcatttgtatagcgtttcgtcaccggaaggttcttatgcgtctaatatggctttgtcgcaacgtcgtctggcgtatgcacgttcgttggtgtactctgttattccggctcatacgatgcaacgtttgtatacttatacacctaatgattcgcgagttgctacttggttggaggtagcggatttgctggagcaagatacgctggctgcggaggctgccgctattcgcgaaattgtagagaaatacccgaagaaccaagacctgcaatttcggcaagtagctgctttaccatattatagtactattataaaaagccatcttcccaaattgcgttcaatgaagtgcgaatataccgcagaaatttatcgtgccttgacgaaggaggaaatattgaatcgttaccggaatgatcctgattatcattcgggaaaaaagaattttgctttgtatgaatactggcacttattcaatatggtgaaagatcctaaggaattggaggagctgtatcgccgtgcatatcactattctcaagaattgacgggtggaaaaccgtgggtgctggctgctaataatttagcggtggcttacttgaaacgcgatacggtggatacggaagtattgaagccgttaattgatttctcagtgagaggctgtaatgtggagcgtacgtttgacggacgtgtgattggtattgataatgttgaggaggtggtagccaatcaacttgccatgtatttgaagaagggagatttctcggaggccagtcgtctggcacaattgctgcccgacaatgagaagaacaagaagataaaggcatttgcgttctgcttgggaggatattataaagtgaccagcggattgaatgatgcggaaatagcccgtcgtctggaaacatttgaattggtcaagaatagttctcctctcaataatgtcgtgatgtgtctggcgatgaagacacatgcatggaatgaaaaagcggagaaagcattggaggatttacccgcagacgatccgaagacgatgtatctgaaagcggtgttatattgtcgtaaaggagacttttatgccatgcaggcagaagaggcgttgacaaactgtttcaagaaggacagcagttatatctcaatagccgaatgggatggagatatcagtgaagactgtttcaaatatgctaagatggggtatgaagatgcaatgactacgggaggaaatgaatagcttaaatagataaataatggtgatgaaaagatatatattgacgtgtatttgttgtggagtatttgcgggcggcgtacttgcccagcagcaagattccattgcaaagatgcgagatgcagcagctgctcaggattccgcaatgcaacgaagaagccaggccgatacagcctatcgtgtgaagttcaatgcaatgaagtattcaatgcagaaacgttatcagcctaaagggatggagttcaacaataaaaagtttcttgataacttcttcttcggtttttggggtggttacaaccgtattattccacaaggggatatgaatctttccggcggaccggaaatcggactgtctgcaactaaattcttttcttctaaaaacggaatgcgactttatggaacatggcaaagcgccagtcgccagagtgataatgaaaaatggagcaattattcgttcggtatagatcatatattcaatcttagtacggcttttgccggatataatccttatcgtatgttcgagatttctacggttgaagggctgggtgtacatctcgcttctttggctggagagaaaaaaagagcgggcgatttccatctaggtttacagatgaagttggccaccggcacgcgtctggacgtgtttgtagaaccggcaatctccttttataccgataatatcgatatctctggagaaaataactggcacggatatgatctgggattgaatgcccgtgtggggatgaattatcgtttaggtaccttcaagcagcgtggaagtacggaagcaggagaggagaacttcttggacaatactttcatcagtgcggctatgggacttcaagcgcaaaattcctcattggccagggaacaaggactgctgggctctacaggacctgtttttaatgtgtccttaggtaaatggtttttggatctgtttggtttccgcttatctgcattcggattgtatgatgcgtggaaagagaatcaaaaggcaggtatggacagaatgactctgtatggaggcggacgggcagaagtgatgttgaatccttttgtgttgttcaagaaagaagcgcgttctatgcggtggggagttgtcccgatgttcggtgtcgagttggggatgatgaagaaacaggatgagcaggaggttatttctaaaacatatacgggatggacaggtggagtacagtttaagtattatccgatagagaacttggctttcttcgtagaaccacgtatgtccttcgtaccttatacctttacagagaagacgatttccggaaaagtgaatgagtattcttttatggataagctgatgaatattagtgtaggggtcgaattgcgtcgtcctactcgtccgcaatggcagcagttagccaaacttaggggagattttactccttattattatacttcttatgctgtcggcatgacaatgccgcaacagttgaaccggcctacttcacgccgtccgggtttcattatcggagctgcggtcggacggcagtttagtccgctttccggattccgtttaggacttgacttcaacaatgcggctacccgtttggcggatgctaaggttgaccgttacacttttacgagcctttctttggattatatgtttgatatatccaattgggtaatcggttatgatccggaacgtaagtttggtacggaagtttttgccggtccggtcattacccatcgctttgaaccgggaaagacctatttgggaggagaaggcggtgtacgtccttattggaggctaggtgagcaatttgatgtttttgctgagtctaaattgcgactgtatacgcaacgttatattaattcgcgtgagggtaagggaactcctttacagctctcttttgcggtgggtacttcgtatcgattcagcccttcttatcgtaagagattgttagaaagcggttttggtgatggaacattctggggaaatactttcatcagtggaggggtcggctttcagttcctgagtggctcgggacgttctataggggctttagcttcggtagggcctactatgagtgtatctgccggtaaatggtttctacctttctggggattacgtttctccggttttgcaggtataagtagttgggggcaggctgcgcgtgaagatggaactcttgctgacaagcgaacgatgcaaggaggagtccggatagagagtatgttgaattttctttctttctggcagcatgataatgaacaacgttggggaattgttccgatgttaggtctggaactaggtaaggtacggaggcaaaatgaaaatataaaggttagtgcggcaggtgctgcatatgccggtgtgacggcagggctgcaatgtaaatattacttctccgatcatacggcattatttatagaacctcgtttctctcgtattccttattcttacagagatgtcaacgttattgataattatgtggggcctcgcatctctatggcagataatgtgatgagtgtgcaggtcggactggaattccgtcgtgcaggtggtaagacgttgaaagagctggctgctcgcagaagtgaattcgaaccttattattttgcctcatggaatgtaggtggaaatatgcctattcatcgggtgaaattagatgacggttccagtcttggagttttaataggagtgtctgggggacggcagttcttcccttgttccggtgcacggataggcttggattatgttgctttgccgggaaagaacggatcggatgcccgtaagttgattagtttatcggcagattatctctttgatgtgactcattttatgggaggttataatccggaccgtaaatttggtgtcgagttgcttgcaggtcctgtgttgtcattcggaaaagagcctaataaaacgaatatcggtgcggagggcggcgtacatttttattataaactgcttaagggattcggtgtttttgccgaacctcgtttgcgactatacactaaagatatatggtcgggtggagatttgactcctgttcatgcgtcattctcggtgggaacctcttacagattttgatttatgagagtataacgtgtactcaaagtagggatattcagtaaatgttcctctttctaaaaaatcaagagaaaagctcacgtaaagcaaagcttttctcttgattttttcgttcaactctcccagtcttctatcttttttgtagaatattgtttacatattcttgttttttccttcccacccatgcattatgtacatgtcttttttaggggaagttaaaacctctcctgtttttcctgttattttagtcagattatgctgcctttctttttttcttttcgaccttttctatcatacataccgcattggctgtatgtatcccaaagaaaatccaaagtacttccgttttcctgtttctagcttttatcctggccagtgagtaatgttgtttctgcgttccaaaacttccttccaggcgggtagctctttcgcggctgagttccgaccgtaagattctccgaagcggctcatctttggcagctctgcccttacgcttaaaggaagtacttatatgatattttgtacaaaatttccggttggcattattggcatagattgaatccgccgcaagcgccttaaccctaaccccggtcagttgttgttgcagatgaatacagtctttcaaacgtactccttcgttaaaagccttaaaggagatatgttctataaaggagattccgtctatctgtatattgttgactttggctccgaattcaacggatttggtttccttgcctctgataatggggcgaaggtaatgccggtcgatactcacgatacggttggacacttttttgcctgcaaataaattcttcccttgctcaaggactgtctgtatgaccgagaaacgtctttggtaatcagaggatagtgcaagcctgttcctgtaggatgaatgaagctgctccagctggtcaagtaacttttccaataattgaagtaaccttcgtgtaatcatacgagtctgtgatttcctgcgtttacgcagtttgctataagcaagataggcacggcgtacatcaagatacttgttacggggacgttgtatgtgcaatgtacggcaatgtttgcacagatgacgatgaagccatacaataccttcccataagagtttggcatcagtaggaaaacgcaggtgactttcataacaggtggcatcggtcatacagacatgaaggttctcaagataaggtttccaatgctcggcaagaatgaactggagggactcaacatcaaggcgattcgctagttcctgacgaattgcactaacgattttaggattggttagtggatgaagcggatcaatctggacaccacaaaacaactggtaatgaatattaccgtttaaatgctcaatcagttgtgcatcggaaaagttggtataggacttcaagaccatcaaggctattttaccttcgggagaaaaataacttttacgacccaaagcagaggacttcaaatgcatttgtcgggccagttccgagaaagggaatagagaatggagtcgacctaattcactcgttgcaaaactttgacgatattttttaagcatatcgaactcggtaaaacctaaacaaggttcgatttctgagattttttgtatctttaccatgtgtttttattttagattacccccgttttggccgtcaaaccgttttttggggggaatgcttaaagatacaaaaaaggcaactaattcgcaatgaagtagttgccttaaattttattattttaggaatatcccaaagtattgcaagcttttttagggatattccttaaatatagaatataaggcaactaattcgtaatgaagaagttgccttatttattaaatatagtcatcgcccagttgaatttgggcgtcattgacatatttgcggatggaatgttcttcgtctttacggcaaataagtaagacgttttcggattccgctatcaggtatccttccaacccgtcaattacagcgagttttcctttcggtaatactaccatattgtctttgctgttatataaaagtgaatgacattttaaactgacgttaccttcttggtctctgtctgataaatcataaagtgatccccaggttccaagatcagaccagccaaaatctcctaatgacacatatacattatctgctttctccataatgccgaaatcgatggacacattagggcatgctgggaaattttcttcaataaatgctttttctccatcagtggcataaatttcctttccgggcgccagtttagaagtcagctcgggcaataaggactcacttgctttgataatgctatttacattccacatgaacagtccggaattccaataaaattctccactttctacaaatactttagctaattccagttctggtttctcggtgaatgtttttactttgtagaagttatctccggcaggctcggcgatttgtatatatccgtatccggtttccggtcgattaggcttaattcctagtgtcagtagcttttcagagtgtgagacaaaatccagtcctttttcgatagcggcaagaaattcatcttcctttaaaataaggtggtctgagggggccactactatattggcatttggattcagtgccctgatgtgataggaggcccaagctatacatggagcggtatttcttcgtgcaggttctagcagtatttgtttttcgtttacttcgggtagctgctttttaactaagtctgcatacattgcattggtaacgataagaatattttctgttggtattaccttttggaaacgatcaaacgtttgttgtaagagtgaacgaccggttccgaagaaatctaagaattgtttaggcaatgttttgcggctaaacggccagaagcggcttccaataccgccacccataatcacgcaataattatccttgtttgtcataacagagactctatttaaaagtttctgctaatgtacggtttattctctgaatatagaagtgtttgagatatgttttattatttttttctctttttttctaccaaactattgcagattcaaaataatgtcgtatctttgcaccgcaattgagaaatcaagtatgcccagatggcggaatcggtagacgcgctggtctcaaacaccagtggattcacttccatcccggttcgaccccgggtctgggtactaagaaaaaagctaagtaattgataattcaatacttagctttttcttttgcttgaattttccccacattttccccacacgtgcaaaaaatatagcagtaagtcattatttcttttggttgaacgtagtaaataagttacctttgaaaagaaataaagcctattaaataaaagtaatggaacaaggtgtttggcaagaaatagaactgttgtaccagaagtttcaaaaacttggtatcagtgaagcggtggactatgacaagtactacctttattctctcattacccattccacagccatagaaggctcaacgttgaccgaacttgatacgcagcttctctttgacgagggagtaacagcgaaagggaaaccgcttgtgcatcatctgatgaatgaagatttgaagcaagcgtacgaacttgccaaagttgaatcagacagccttgtacctataactcctacttttctgaaaaggatgaatgcaatgctgatgcgtactactggcagcgttcacagtgtgatgggtggctcttttgattcttctaaaggagagttccgtctatgtggtgttacggctggtgttggcggacattcttatatgaactatttgaaagttcctgctaaggtggatgaactttgtgcgattcttcaagagaagcaaaagaaaatgggaacatttcgggaacaatacgaattgagctttaatgcccaccttaatttagtaactattcatccgtgggtggatggcaacggaagaacggctcgattattgatgaactacatccaattttgctatcacctttttccgaccaaaatatttaaagaagatagagaagcctatatcctttccttacgtcaatgccaagatgaagaaaccaatcagttgttcttgttgtttatggcaggacagttgaagaagtcgctttctttggagattgaaaggtttaaagcttcgcaaaagaaaggattctgttttatgttctgatattatattaagcaaagaattactatttacgaatttgggtaactttgtgtagaattaaaaaaagtttaatatggacttggtgcaaatttatcataaagcaaatattttgattgctcagacttacggtataacaggtgtaccggaaaaaggatatgttatcgttactgttaataatgttagatatattgtatatttctacaaaatagaaagtggctggaatattgagaaagtagaagaatgcttataactgaattctgcctttctttccattattacagttgaagctaattttttatgtttatcttctatatagtttatgtaaatgtctaaacaaattatgtagccaatttccttttttctgaagttttacaccaaatatagcttcgcataaatcactcatatttctttcttccattctctttttattggcatagaaatgagtattatcttcttcacgatagcttacaagaattcctgattcaaatcttaagaaaagctctttttcatacagtgaagcatatccttgatgtacatatttcatcattttgccatgtggaatacgtataacttctgagtaccaattcgcaaagacttttgtttgtccgggaaataaaaaatctaatccaacttctttatctgcaccaaattttttattaccctcagatatattagctttcaaatcaacaagatataatttattatcctcaataagccaagaacctatataccctctccagcacgccgtatgtgaagcaataaaccttatatcatgcttaataagataagaagctaatggctctgtcgcaagataatattcttcaccattataaattaatcgttctctacattgtgctgtcataatatatctaaattataaatgaaatttccacttattagtatttaacataacttttaaatagcattaggtctaatgttacattttaggattaatacttttcaagtcgtctaaatattgcactatatttatttgaaatggttgaagttggtatagttaaaaaagaattttgactttctttatcttcactttctattgccttatactttgcaagcaaagtctgtatataagattcctctaaatcaacatttaaattatgctgaacaaaatcacgtaacatttcataattgtattttaattcaaatatttcaataaaattcttttcgccatttgtatataaaacaaattgtctatcgacaattgctccagaagcagttcgataaccgcaagcataatatattctgtcaccatgaaattcttcttcctccaaatcttttatcatttttcgaattttaggaactgattcactataatatatataatcacagatttcgcgttcttcttctgtaatatatgactctttaatttttttagcatatccttgaggcttttcaaaattcgattcaaagatgtttggaaatagccatcctgtagttttagtaagaggaacatagttatttgccaatatagttcttctttggcttgcatacatataaagttggcgttgaattctgtatatgtcagatttccaactgaaactatcaatatgttcctttaccatattacgctcaaagaaaccataagaaccatctacattattacttatatagttcttcatttcttttgtaataaaactctcactttcattctcattacatgaagaaaacaaaagtagtccaaacataaatactatatacttaatcataattctttctttattctatctaacaatttttttaaaacatccctattatgcttatttttcaaagcttctgaataaatttcatttgcagtagttaacttattaggctggtaaggttctataaacattttaggattagctttcgttataatttcattatataaatacgatatatcaggttctatattaattttagaacttaagctgttcgctgttgaacgatattttgaaaaacgatatattagatatgacaaataaacaaatagtataaaaaataatgtccaaaagcaaattttgacaacaaagaagtgctctgtataataagtttctttatcattattatagtttagatgattaaatgtgacttcataagtcaacagtggatatgtatcataatacacacgataaaaaccattataaatccaatttattcgatgcccacataacggttcgccttctgggttaggtgagagttttatattttcaaaatttacataattattgtcttcaaagttttgataatgaccttctgtctgcaagtagtaatagcgattgtaaagacttaaaattttattaattgttttcttgttattttgattatagcaatccttataatttctatcttcttttataaggtactcaagtgcactagtacaactctcatctaaagaaggtctccaatctctcaaattatatgaagattgtaagtaccctacagctactggtttaaaaataaacatctgaaacttatctttctcttgatatttcagcaagaaggccctccaaggcatattctttactgcattcaattcatataactccctaaaacaccccggccttaaacatttgaacattgttgatgttagtagagggaatctgtcataagggaatagcctttcaacagaactatagaaagttgcatctttttcattcctattatcaataaactgaactgcatccatatccataggaacataagacgtactgccatactcttctgaatacatcaaacgagattctcctgcccaatattcatttaatttatcatagaactccttctgtaaagtgttctttttcttttccacataactctctgacatctgtaaaacatgcaagtgcaagaaatagtaagctataggaaagaatattaatactaaaataccaataaaaattttcttcatctttacaattacatttatttacgaatagatttggcttttacaactttacgataagaaacattttcgttatctttaaattgaatcattctatatttatttccaccaacataataagaccctccagcaccatatggtccttcatacgtaaatgtcacttcaatattatgatagcaattattcatataatcatttcttgggcgagtgctctttacaaacatcattttaaaatcttcatacgaatattctacaaaataggcatcaggacatgttacgttaagtattcttttctcccaaccagcttcatcaaaaagaggctccaataatacttccattacagttccctcaataccactagaagtatatcctgcaatagttcttaataactcttcaaaagcatctgcaatggcttgcattttatctgtcgtatcataaaacagtctcactttataattatcccattttgaaagaacttcatatttgttagattgtatttctttatatattgtattcaattcctttaattgattaaatacaattattgtgttgctatggttattaggaaatttcaaaaaagatgcagaagcatctaacaataaatcatttaccttttccaattcattcaaacttctgtcataatcatcttgtgagaacgaaggaatagtacatatcaaacacacaaaaaatataagcaatttcattcttctcattttacaattaaatttattctacaatcagagtatttaattaaagtataaccttttagattacatatacaataatcatctaatatcaaatataaaatttattattcttctcaatatccaagaaaagataatattaaattataaagcgtggaactgtaatgccacgtctttgaatgaaggtcctgagaaaacctttgtgtacagatgtaacaatagcagcccacgctatagcgtgagaaccactatgctattcttgtacacgtttgaaagtttctcaggttttcattcgcaagaaataagcataacgcttcttctaaattttaatatgtcttggacagagttgtctcaatccgcttacaaagatatttaattttattgagatacaatcaaatactatcaatattacattctgaatcctctactttttcttgattcttccgttgattgtcgtaaaccttgccttaatttctcccattgctctttgaaccattcgctgattggttgtcggtttatagtcagcaccaatttgttatcatcaaccgaacttttctccactttgaaaacatcattctttatttcaaatcttcgtctatgctcttcggaatagacttttccattgcatctgatagcttcctttttggtcaaaagactgtttaccatgtctttggtaaatccgatggcatagcagagtttttccattctcaacatttctttgagcaatgggaaccagttgaacgctttttcaagaatggcgttcaatcgtgatatttccttgtctttggcttcaagttcttgatgatgtatttcttgaagattgcgaatctgcttgccatgctgttcctgcatttgttgcatcttgacttttaattcatcaatgcccttgtcacgcttggctatttcatgccgtaaactctcgttggcttgctccaaatctttcaattttccgctgccgaaaagagaaccgacgccacttgctatggctgtggctgcatcagtggctacacttttgagcttgtcggtgcgtatctccgattttacctgtttgagttcctgttcggcaaggcttacctgttgctccttgtgtcgcttggtttcctctatacgttgcagttcggctttctgcttctcaatgatgaagtcgtttcgttccagatgctctttgcctgtaacagcttttgcctgcccacgttccatcaggagaatatcggaagcaagggtctgcatggttaccatatcctcgtcattgagctttcggctctttccggtttcgtggttcatccagtcgaaaacgatatgtgcatgataattcggcttgaaccatctgctcccaacctgaaaactttccctgtcttccgcttccggctgaccgttcagccaatgcccttcgtctttgtgcaggaaaatttgtaatggagtgatgccccagcgtctttgacactcttcaccgaatttgcgtacatcagccagtgtggtatccggtctgatgagcaatactccttcacggatgggtgaacatcccgccaccttgataatttttccattctttcccttgcgttccctttccttttcctgcatggcacgtccggtcttttccttgaccatttgcttgatattgtcataatgagttcgcagttcgggagtgccgaagtcgggatttatccactgttcgttgtcggtggaaagttcgggaacgacatagattctggactccccgatattacgcatatactcggcagtccttcggttgtgcgcctcgctcgatgcgattctgcaaggcttgatatgtatgcttgattttgttgccatagcttcttttctttgtttgcaattgattattctgctcgctttcgcagaggggttcttaggggtaacccataagcggagattgcaaagagagggtcactctttgctcggggttctcaggggtgaaacaccctgagtgggtcattagggtaaagccctaatcccctcgggagagcccacaactacgaaagcggagcgtgtagttatagtgggctataaccgaaagccgtttttctttttcggtgactggctgctcactcctttgacggattggacttgcctttttctttcaacctgtttctgtaagtattcgttcaagtccttgcatcctctgtaaatctgcgaagcgtcccggatgtatcggtctctgccgtattccatgcggatttgccggagtgtttccattcctgcatggtcgttgtctaaaaagcagtggatgcgttcgtaattgcccaacggatagagagccttgtttacattcgatactgagttcaatacaatgtagtcctgcccgtccaattccggataatttgggcagctctcttgtctcaatgtcaaaaaggagaggtagtccataaatccctcgaacacataacaggtattcctcgctttcccagactgtctgatgtgggagatttcctttggagcgatgcagcccttgaaatagcggttgcgaacctcaaacccacccgaagcattgggaaaggcgatggcaaagtaccgcttgccgttgtgggtgaaacgggcttcactacattctcttttcgccagttctgtatttattcctctaccttgcaagtaggcaagcagggcaggagatgacagcggaacaatctccaactgttggaaactcggctcagaagagctttgcttgccaaaagaaaaagataccgggcgcacgtgcggtgtctgttctgctatccgtttcaagatgtaaggtacatggtcggtagcgtacagatgtgcagccagtgcaatgatgtttccgccctttcccaaaccgaagtcataccattgttcacgttcggtattcactttgaacgatgcttcactctcttcccgaaacggagatttgtaccaaaggttgataccttgttgttttactggtgaataacccaagctgtgcaggtagtcggctattcgtatgcttttagcttcttctattgtcattttcttgcggatttgttggtgaatgaaaaaatgatgatttgatgaatttggaatttaacacactgttaaacagcgttatatcggctcatctttttctcatcagattgcttgccaaaagagaaatgatgttttcttttttcatcagcaatcgttgttgatgagtgtttgatgaatacatatctatctgtaaggcaatatattacttcccttattcatcatttcatcaaaataattagatagcggtcagttgttctttcgtgaccgtataaaaccgaccagttttccttttcggctcatagtggcactcacgatggggtgcgaactcataagcggtgtaggatagcgaattgtgtgcggaagtaagtttccatacttcctgcacaactttcctcacttgatacttttcaaccttgacctgtgaatagagtagcaaggttacaaggtcgttcaggcagaatgatacgctttccacgttcatgttcgacatgatgtcaagcaacaactcggtcatttctatttccagtcggttgcggttgcttcggattattttctgcaaggctgcggtatgtgtcagtcttgggttgaaccacatacggctttcctgtgttgtggatagttccctttgggtcaggaaataaagaaatgcgggtatttccgcttttagcttttgcagaaagttggtatcatcactctgcaacggcattatcttccgcacccagtagcgtgtttctcctgcgtctatgagtatgggcagatattcgttgttggaacatagcacgaacttggcgaagaaagcaatctccgttcggtctttgcctttggcttccaccttgtaggtgaaagtggtgctcaggtttttcaaccgttcgctgtcttccctgcggttgagcaaaacttcgtccacaacgattagcagctttcctgcccagtcggaattgaattggctgcggaaatcttcgttggtgttgaaagtcacgttgttctcaaacacggctttcaggaagttcaagaacgtgcttttgcctgtgttgcgttcttctgaaacaagtaggacaataggcagcttctgtgtcggctgtagatacagcagttgcatatagtccatacccagctcgtattgttccccgaagatgtgccgcatcaaggattggatgtgggagaagtccccctgctgcggtttatgctctataggctcgtaaaggttcagaaatccctcaatctccttttggtagttcaaatggttgggaacggtgcaaaagccgtcatacttggggacggtggcaagatagttctttccatagtcctgccgtaatgtgctgttgttccatacgacacgtttcttttcataaccgccattagcgcatggctgattgaccaccttgtacaaagttgttcctacgcgcatatattcttcctccttcataggcttagattaaagggttgtgttcacctaaaattctctgaatgtcggattgtcggtatctgaccttgtttccaacctttacaggcttcagatagtttttcttagaccagtgccagagtgtggtatcacaaacaccgcacatctttttcacttcctctttggttagatacttctcctttcttgcttccgcaatggcggtagaaagttcatgcttcgcacggctgattaactggttggagaataatagcaaatcttctcctgttacttccaacttgatgttgccgtttccgttttggataattgccaatatgtctgtcataggcttcttgaaactgccggttgtaagacttcccgtttcggcagtattataaacgaaaagccactaccccgattaggatagtggcgcaaatatataatgaaaatcaattgtaaaacaatgatattcaattcgttaaattcgtaaaaacgaaaagcgaattaaacgaacttcaattggatagataggctttcaattcctcgatggcttcatggtcttcaccaatgtcttttaccagtttcttgctgtttccaaacggagaagtgagatttctgtatgctttctggatgcctctttcgtggacgatttcttgttccttgaactgctcgtacagtgcgtttctgaaagtcttgatgggacacttccgcatgaatcggtattccaccagtgcgataaacagtcgtgctatatctgtttccgtagcatgagttttcaatcgtgtgccaattctttcaatcagtatgtcatgcctttctatcagaagttctggcaacgtgcgtgtgtcggctttgcgtcctgcggtctttggctgttcttcctgcaacatatctgtttcttcctcgtccatgtcttcatcttcttctattgcccattccacgagagagttttcctcaatggctttctgttgcttcctgaatacttgccagtcctctttggttctcatgccattggcgatgctttttctgataatgaatttgaccatgccggaaacaagccatttgtataaggtgggaatatcctttcttttggtcagttcctcaccctgttccaccatgcactcatagcttcgtccgtaatagagccatgcaagcatggcaggaacaatgcttctcttgttcggggtatgaaactcatttactatcttctcggcaaggtctgattgtaaaagaacattttccagttcctcgaaatcagggtttctatcatcacctattctcttgcgtgctgcttctttatatttgggaacaagccttacagccgtattgaaaatattgaagaatcctttgaacttcttgtcgttcatttcttctacgaaatcggcatattcatccggatggctgtcgagccattcctttatcagtcttttgaaattatcatattcttgttgtcccatacaagtatcaatctaatagttttacaaggtctttcttcatttcttcgtcaatatccctgtatcgtctgaaagctttacttccctccttgtgtcccgacagtgcggaaacgaggttcgggtctttcacttttttatagatattgccgataaatgtacgtcttgccagatggctgcttgccacttcataaattggtcgtttgatttcgttgtgcgtcaacggatctaagattgttacgatgcggtcaactccagccaacttgaatatcttttttatggcgtcattgtacttttgttcggatatgaacggcaacagtttcccctcatattctttgtagcgttcaaggatttctttcgccttgtcgttaagtggaacgcgtaccgtaaccggattcccctctttggttttcttgggaatatactctatggcttcattgaccacatttagtttggtcattcggtacaggtcgctcaccctacatcctatcagtgtctgaaatatgaatatatccctttgtattgccaattgtggggtggcagaaaggtctgcattaaaaatcctgtccctttcttcgagtgttatataataaggtgtgccgtatgtacactcttctatcggaaacttgtcgaaaggtctgtttgtggtgcatttgttatcgaagcaccacaggaagaatgtgcgtattcttgaaaaacagtctatcagcgtgttcttgcttctgggctgtggtgtcctcttttcgggaatggcttcataaatgctcgggtaaagttcatagtactggtattcgttctgaaagaaatcccacatatcccgaagcgtgtcaggtgttaccaaatccacgtcaaggataaagtccttttgccctctctttgttgtccttacatatagttcataacgcagtaaggctcttttgacaacccggaaatttttctttcgtacttccgacaaagggtgcttgtttagaaattcatcgaatagttctccaatggtaggcttgataactacttcctccggcagaaaatatttttcaggatggtaaaatttatcaagtgttgtttttagccattctttgtctattgcttccttttcttgttgatataccttctcgatataggttttcaactggcgtatctcttcatttatatgggtacgcatttcttcattacagacagctttcgtttttacacattcgtctttatcatcccatagattgggattgatagccaactgagtaggagcaacggagtctaactgccttccgtttctaaagcgtacatagattgtagccatggattctgtatcatatcgcttggctgcttttttaatgataaaggttactttcatagacttacaggttgaattttactctgctgcaaatataagtattttccccacattttccccacgtctgctgaatattttgcaattcgattaacttggattaaaatttaattagattgtaacacattgaaatatagtgtaattgcagtattttttgcatttttctttttccctacattttccccactttaattatttcaaatgcgggtctgggtactgaagcggagaaagttgaaaaactctctccgtttttcttttctacttctcgtaactcgttggtttgctgatagattaaatcgggtcaacgtaacaatctgagggattctatatttaagcatataatttagcaagtctatataagaaaaaagctctatctcttactcctctgaactgtgctctaaatgctttgattttagcattgaatgactctgctgcggcattggttgccctgggtcaacgtaacaatctgagggattttgtatttaagcatataatttagcaagtctatataagaaaaaagctctatctcttactcctctgaactgtgctctaaatgctttgattttagcattgaatgactctgctgctgcattggttgccctcctttcaaagaaattgattatattcagataatgtgtttgtatagaacgtgcgacccttccaaaggtgaggaaccctgatttatctacttcatcataccaccttgccagccttgtcaaagcaatatccttaaacttacactgatgatagattaagcctaaccgcatagacagataatatcctttctttatatcgggatattccttgaaaagaatttcagcccgtattctttgagactgagtccataaggattccttcttgtaaagcagataaatacttctcgctaacaactgctttcttgtatctccattagcgaaaacaggtgcatgatacatctttccacaggcctttgcataagcaatctgagtggactcttcatccaaagcctcccagcgagcttttacacgcatctcctgcacagcttcataagctaacttctgtacgtgaaagcgatcggtaacacgtttggccgaaggaaagcagatgcgtgcaatctgctccatgttaggagccatatccaaggttatctcgcgcacttggtaacggcggcgacgggagagcttaagcaggacagaagtgaccgtatgaacgtccgtacctttaatgatggcaatcatactacctttaccaccgtgagcttctttattggtcagtacagtatagagttccccacgcgagagggctacctcatcaatacagatataagcaccgatattcttttcgaatagtagccaatcctctgcatgaacaagttggtcccaatggagataaccacttagatggttacggtattgacgctccaataaatccccgtcaactccatataaaacacctaagagcttgcaactgatcggatagctatcaatatagttcttttaaaaaagacgcaaaatcttgcgtcatacgagtaccttcagccaccatacgccagttacgagaaatatactcattatgcttctttaagagccagcgacgacgacgaatattaaggaagaccttcttgccacggagaggaaaatcctgaacaataacagggtcataaaagcctttactctcagtatcctgatctgtatacttctcaggaacgatatttttctcctcaaggtagaacacaacttcatttacactttccttcacatcaacaagatcaaagtagtctaaagtgccttcaggaagaagaaggcgataaccgtttaattccataagctatgaatttggagacaaagataacaatttataaatttacccctcaggtttttacattgacccgttgccctcctttcaaaaaaattgattatatccagataatgtgtttgtatagaacgtgcgacccttccaaaggtgaggaaccccgatttatctacttcatcataccaccttgccagccttgtcaaagcaatatccttaaactaagacaacttgattttagaggggcttctctctatggtaacagaactgaaagagaagttggaagcgcaggtaacgccagccagccgggaggaaactctcgaacggtttggagcgattgaacaggcattgtcgaggctgcatagtaatccggctgttcctgtggagaagttgcagactatccaaagtcaacttgacgatgtacggaacaagatgcaaggtcagcagcatatcgaggacaccaagagaatatcattggaaatctatcgtaattttaaaataatggttgataccttgaattcctacaagacggataaagaggaagtttcccccttgccgttctatcaacggatttacaacaaggttacttcttggattcgtccgggattgtttatttttttggcagtgctggttctctgttccgcttccatatggttaaatatccatttggctacacggatgcagcagttacaggacaatgatatgaaataccgttatttgctgatgcagggttgggcaaacggagaagtccttgatatactggaaaccaaattcaactggcagagggataatgatttcattcaaattctgaccgattctgtgatagattttgaatatcgcagcaagaaacaggcggaagcattggaacgtgcaaggctgttgaacgagcaagccgaacagctaaagaaagaagccgataagttgggtaaaccataaacgaagtaaagctggagtgatgaacgatgttcatcgcttcggcttttttcaaattcattttttgctttgtacagtgttctttctcgaacattgcgtaatgtgatgtgttttgacttttggacaatcaacacgcaaattaagaagaatagtttaagcaaagtaaacccaatataaattttccattcattcttctgattcagttctcctgatgtttgtcgattttataccctgaataatagttttgtatagtttatcatctttacagattccttcctgatgatatgcaggattcttatctaaagatacagtatagattgtcaaagatatagcagatttgtcatccttaacgggtttaacaaatatgcttaattctattcgtttccctacagatgtacttaacaacttttctctgtcgatatatttcttagccttgataaatcccgattgcaaatctacacaatctatgcagagctcattttcacttgcctataatcactttccacaatttcatgggactacctactacaacctgtttggacatatggattgaaaaacttaggttcacgctactcatttacatgtttctacaatcttaagcatatcgatgttgtgtatttaggtattctatatctctgcacaatatttttttcttgttaaatttttaagatgcaaaagaatgatgttgtaaaataattacggataaagggaattgaacttataataggtgatagtttacgtggttttataccgaacttaatctcgtaatgaggattgatgaaataaaattgttgattgataatcttgtattctcctaaagctatttttctaaatgattcaatggaacattgagtatgttttatgcttagtaactcatttatcgtttcttgtttttcatggcataaccggagcaaacctacataaagcagtttaggcagtaaatggatgaatggcaagtgtgaagctaaccaacttttacaaatttgctgatgtcctccaaaaggcatttgccatgcaggaaaagacataaatataattccatctttggatagaaattttttcaaatcaataaggaatcgctctttattgtcaatatgttccaatacatcgtggcagataactatgtcaaaacagttttctaaatcattgattttaaacacatcggatgcgatgaacattccttttgcattaacttccttgaaaaaacgttttgcgtcttttattcggctttcagctatatcaatcccagttgtgttacaccccatttctgaaaaagacagcaagttgccgccatcgccacatcctatttccagtatattcattcctgtttttatcgctttatatgtttggatatatggaatgtagtattttctactcgttgcggcaagttctttaaaatacattgctctgtctgattgtcttttttgcatcgctatttcatttttttataagcggtgcaaaataacctataataaaacaaaatccttgaagtatctcaagaaattcgtgaggtcgttatttttttgcgtatgtggctgactgtttccggggtaaccgaaagataagatgctatatctttcagtgatagtttatttgttacttcgggatactgttggataagttttagatatcgttcttcggctgtatcacagtggagggaaatcactcgctcataaaattgagcatagagtttctctgcaactatgcttctcaaccgtagcgtttgtatgtctgtttcccaaaaagcatgtaatgtttctaaagatataacataggcaacgctattcgttgcagcttctattgtaagcaatgacggaattttgcatatataggaatggtattctgctatatattcattttgaaaagcaaacccaatgatatgttcagttcctctattatccagcttgatataacggaataaaccgcttttaacgaaccccacataagtggatttatttccctctgttatgaaaggttcttttttcttgaatgacttcattgttccgttcttaatgataaattgttttaataaagaaagttcggaactttccatatacagattaaaagttttcattattgcaaaaataaaacgtttcttgataagtttagtttgtttctttatacatccaaaaacggacttatatctattatatatgtactggcgaaaagaaaaacagtattcttttttcgccagtattattgggggatgataggttagtaatttgaggaagctatgaatgcttttatttcttcctcacttggaagctctatcatgtatttttgtacgaagatgttcgggtctaatccggcagtggcatactttactaatgtatctcccttttcagtgcaaagcagaattccgataggcggattatcatctggctgcatcacttccgccttgaaatagttcagatacatattgagttgtgaagcatactcatagcggaacttgtctatctttaattccacaataacgtggcacttcaagatgcggtgatagaatacgaggtcggcaaaatagtaatcttcatcaatcaagatgcgtttttgccgggcttcaaagcagaaaccatgtcccatttccaacaagaagcgttgtaggttgtcaagaatggattgttccaaatcgttttctgttactaatgcacactcgtttaatcctaagaactctaaagaaataggggtgttgataacatctttaggctgtaataaggtcacttgttgctggactaaagcggagagggcttctttgtttttggagagtccactacgttcataatacaaagatgatatttgccgttccagttctcttgcagaccaacagccacgtattgcttccatttcatagaaagcacgctttgtcggattttcgattttggatatgaattttaaatgagaataaggtaatttattgaacaacctttcagcaggaatactccacttattatgttgtaattctgatgcttgtaattcggcacacattgagtgccgaattggttcggtgaattcggcggacagcgtgtgccgaatttcatttccagtcattatatattgcaatatttcttctcttagctgtggataaacaaggtacagccgtctaaactctcggaatctacgttcattcagaccttttgtattcagccgttgttccagctttttcaacaattgttcaccgtaggtggcacgctcttccccgttctgctcaaattccacgatatagcaccccataagccagttacgggaagtaagggcgaggtttacagcgtgtgcggcttgtgcctgcaacgtgttctgtatcgtactgatatgttttactaatgcttcaaagtccatagttgcaaagataagtcttttgtggttaaaactttagttcaggcaagctgtttattgcttcctctttcaatttatccacggcacgggtgtatttctcggtatgcttcaatccgctgtgccctaaaaggctggctacggtcttgatatttgccccattgttcagaatattcacggcaaatgaatgtcgggcgcaatgccagcttatgtgtttgtctattccggctctttttacccaacgctttactgatttgcagcagctttcgtatgtaggcaaatcgaatatcaaacagttcttatctgccggagctgcgccaataatggataatagaccgtcattcaaggggataaccacaccgctactggctgaatgtcccttggtcttgctttgctcgaatttcaataatcggttggcataatccacatttttataagtaaggtcttttacatcgcaaaagcgtagaccgcaatacaggcagaagataaacgctcgtctgattgtgggggtttcgttgtcataatgacaagttatcagcttttgtatttcttcgggcgaaagcacatctttccgaagcatctggctatctactttgcaggtgacatctttgcaagggtcttttagcattacatcatgctctatcgcatagcgaataactttcttgaaacgctggtaaatgcttttagcaccttcgccaacgcttcgggattgcagataagctacaaactgttccatcatttctttggtgatgagttccggtttaatgctacattcattcatggggtacttctctttcaagaagaagtctttgaaacggctaagcgcaatttgcaccatgcgaatatctttcttagtatagctattgatataggcttgaaagtagtccaagaaattaacagccctgtctttctttaagcggtaacccaacatgctttctttaaactcctgttcacgctctgcacgtatgcgcatggcgagttccaaagtttccttgttctgttgccgttccgcaggagtacggggggtgtctatcagatacaggctaaggttttcttttctcctgttatgctttactgcaaacttgggcttgccttgcattttcccactatcgtaatacacctaattaccgttttcatccaatatgggcttttcctctctacctaaataatactctaagtaaaggcttattctaccgtccgagagcttattttgctccaacttggggttctctttcgttttattttctaactttgccattgtttagaggttttatcccgatttaggtaccgtaaccgggtaattacactaaatagttgattttcttttgttttccgatattgcaaaggtacaaaagaaaatgatatttcaaagtgtactaaaagtgtactgaataacagaaaacgggcaaaatagggcaaaaatggagaaaataggaaatatgcaaatagctgataataaggaaaataaattcttttgttttcctatgatttctatggcttgtaccgggtctgggtattgaagcggagaaagttgaaaaactctctccgcttttcttttctatccctcgtaactcgttggtttaaattggattaatccgaaacttcggttgttttcagtctgtttatttccgtactaggttatgaattaattttgagcttgtgcaaatttattcttaatacttaatggatttatgactaatgatgcatgattttattcgtctggcaactgtcagacgaataaagttatgtatgacgagtattaaatcactgcgtactgctaattaggttttaaagaaactaatataggtaagaagaatagataaagttgtattctgaagaactattgcattctgaaaaatagatatgcaaatgctgtttgttaaaaggcgatgggcaattcgcaagactaactgaaatttcctgtttattctgtttttgaggtaaaagctgtaagttgaattcataaattttatccaaaagaaggcaaaagaatagaataaacaagcagaagcgtaacaccctgtcaataaaaatactatatttattgcagctagagagcactttaagtaatgcttaagaggaaaaatgaaaagtagtatatatactatatattttctattattaattacttaaacacattttttatggaagccaagaaatcaaaaaaggctgcaattgagaatcaacggggttcttggttgttgatgggtttggttgttgcgctcgctttcatgttcgtttcgttcgaatggacacaacatgatgtcagggttgcggcactatcatcagatgatgaatccatctttgtgacagagctagttccaattacattccctgaggagaaactggaaccgcctccacctcccgaaaataaggtcgtagacatattagaaatagtaaagaacgatatagaggtgacggatgaggtttctacagtatcagaggatatgaatgcagttcatgaaattgtatggataccgcctgtggtggaaaccgaaacggtagttgaagacgttattcatgtcagcgttgagattatgccggagtttccgggtggtacggctgctttaatgaaatatttaagcggtaatatcaagtatccgatgatttcacaggaaaccggctcacaaggaaaggttattgttcagtttgttgtagataaggacgggacgataacgaatcctgaagtggtacgaggggttgatccgtatttggataaagaagctgtccgtgtgatcagttctatgccgaagtggaaacccggagtgcagaacggtaagaaagttcgagtaaaatatactgtgcctgtaatgttcagacttcagtaattgcttgaaatagatgagtgtaaagagggtatgtcaaaattcggaatcgaatgagccattgacataccctctttttctatatttgttttttatctttttcgcttataccagatatttgagagtaaagagggctgcgagaatatacatggtgagtgatatcttcttgaacttacccgatagcagattggtcagtacataactgataagcccgagaacaataccgtctgaaatgctataagccattggaatcataatgatacagatgaacgccggaactgattccgtgaaatcatccagatcaatgtctttgataggtgacatcatgaataaaccgaccaacaccaggatagggcaggttgccgcacttgggatggagaggaaaagcggtgcgaaaagcaaggctattccgaagcagatagcagttacaaaagaagtgattccggaacggcctccttgagcgatgcctgatgcgctctctacaaatgtgcttaccgtattggttcctaacattgcccctacggtagtcccgatagcatcggccataaatgcctgtttggcacggggcactttcccattaaccaacattccggctttgttggatacgccgaccaacgtgccgatggtatcgaacatatcaataaataacaatgtaaacacagtaaaagccatttgagtggtgagcacttttgagaagtcgaacttgaaaaataccggttccaatgagggaggtatactgacgattccgttaaattcggtaattcccatcggaatgccgatcaacattgtcaaaaggattccccatagcatagacccttttaccttttttataagtaacacggaagtgatggcaagtccgataagcgccaaaagcggagaaccggaagtgatattgccgagtgtcactaaggttgcatcgttcttggtgataactccggcattctgcaatccgatgaaggcgataaaaagtccgatacctgccccaatggcattctttagggagtctggtatggcgttgaggatggcttcacgtaagttggaaagggtcagtaggataaacaggatgccttcgataagcactgctgttaatgcaaattcccaagtattacccatacccagacagactgtgaaagcgaaaaaagcatttagtcccatgccgggagcaagcgcgaacggaagtttggcccataccgccataataagagtggctattaaggaagctgtggcggtagcggtgaataccgcccccttatccatgcctgtgacacccagtatgctaggattcacggcaagaatgtatgacatagtcagaaatgtagtaatacctgcaagaatctcagttcttacctgcatggaatgtgaattgaatccaaacaacttttgtagcatattcttgttttccatattcttcgaatatttttagacgttacaaaagtagataaattttagacaatcggggtgtattcagttgttgaattcttcttgcgccactattctgtctttgcgataaaaaacatatctttgtatccgagaataaaaaacgaacgtttgttttatgaatcttctactttctataaaaagaccttttatttggctttcccgttttcgctatcgttgcggatatggtgtgcattccccttttgctttcagtctgataacggatgtgatttatgagtatacaccctattatgcatatcatgctttgcaagaagagcagagaaagaaagtgagagaatgtgggtggagtaagagtagaggaaaaataaaccgctttttgttccggttggtgaataaagtacaacctgccactgttatagaagtgggacagccttcgacggcttcactttatttgcagtcggctaagccttccgcttcttatctatttgcttccgacctctcgggactgtttctggatgcagatactccggtcgattttttatatatgaataattatcagaatcctgaactgatggaagaagtttttcatatttgtgcgcagcgggttactttgaaaagtgtgtttgtggtgcatggaatttgctattcaaagaagatgaaaacgctttggaatcaattgaaggaggacgagcgggttggggttacttttgatttgtatgacttgggtttactcttttttgataaaacaaagataaaacagcattatatcgtcaacttctgagaacctttgtacgttaaccttatatagatgattaaaaaagaaaattatgaaaaagagccttgtatatacaaaaaccggtgataaggggactaccagcctagttggcggcagtcgtgtgccgaaaacgcatatccgcctggaagcctatgggacagtggacgaactgaattcgaatttgggctggctgtacacctatctgttggatgaggcggaccgtcactttattttaggagttcagcataagttgtttgctatcggctcccatctcgctaccgatcaggagacaatgcagttgaaacctgcgagtattataacttccggagatgtagaaagtcttgaacatgaaattgataagttggacgaacaattgccggagctttgtgcctttattattccgggtggaagtcggggcgcatctgtttgtcacatctgccggacagtctgccgacgggccgaaagacgtattttggctttatccgaaacttgtacaatttcgcccgaagtattcgcttttgtcaacagattgtcagactatttgtttgtattatcccggaaaattaattttgatgaacaaaataacgaaatattttgggataatagttggaaatgatagattttattatacttttgccgaaaaatagaaagcaagacaaatttagtattcactttaaatactcaaaattatgtattggacattggaactagcatcaaaacttgaagatgctccctggccggcaaccaaggatgaattgattgattatgccatgcgttcgggtgctcctcttgaagttattgagaatctccaagagatggaagatgagggcgaaatctatgaaagtatcgaagatatttggccggattatcctagtaaggaggattttttctttaacgaagaagagtattaattttaactaagaactgaacatataaaatgcccgataactatacaaaagctatcgggtattttttttgtatcttacagtgcttagaatacgggcatttgccaaatgaaacctacagatacccggttcgtagtgtagtccgtttgtcccaatgctttggcccgggaagcaaagtcatagcaacgtcctacgtatgttacgaagaagtgcagattggtttccatcggatagaattcgataccggcaagatatccccacgaggtgcggtaattccctttttccactccttcggaggctttagtgacagatgcggtctcatacatccctttcacaaaagcgttccattttggcagaaaacggtagttgcatttggctacaacagaaagataaccggtgtcgaagacgttatgtccgccttgatgtccgacaatactcgtgatgattcccttgcggtcgatatcttctttcgaatacatgaaatctacaaaggcgttccacttacccagattcagttcattacctatggcataataatacatattatgatttttggcttcattcatgatagaggtcgaccaacgagttttgaacatgttgttgaagttgccattccagttcaatgtatataccagcggcattttcccggatttcagatcgggtacattaccttcggtgtcttctgtaatcccgtaggtactgtcgaaagaaccgttgcggctgtttaggatttgcagattcagttgctggtcgggagtgatattataaccaacattcaatccggtcatgaagttactcatataatcaatcatgtcgcaatattggtagacatcaatcggattcagatcgaattcaaaaccaccgtaagcggcgcattgcttcccggcgaaaaggctgaactgctcatttagttggataccaatacctgcataatctatagaggtgggaagattatcaatcatgccgtttgcatcgttcgagcggttaaggcgttgacggtaacggtaggagagccagttgttgatattaccttttgcctcgatgcggagttggtgcatattgaagtcaccttcttgaaatccgtcccggaaatgggcatcaaagctaccttgcatattcagataaaggttgaacttatctgtattctttttcacgtctgtcagttcctcaaataaaggagtattaggagagaatttgtcttttttctctgctttttgggcatatattccctgtatgctgcccgtgaggagcagtataaaaatcaattttttcataagttagtcagggtttagtattcgttaaaatattgctgaatttgcttccagtccgtagttttggttaatgcaagcattagcaatacacgcgacttttgcggattcaactcctgcgaagccacaaactgatatttagcgtcgtctacttctgcgtcaagagtcgtaggaccggttggaacacgggaggaacgaacaacaagaatcccttttttacgtgcatctatcaatgatgggaagatgtttttatggatattcccgttacctactccggcatggatgattcctttatatccgttgttgagcagaggagtcatcatatcagcctcaatattggaatagctatatacgatacctactttggggagtgaagtaaggcgggtcacgtcaaatactgatcgggtggtatgcttcttgagtgttatctgattatagaatacttttccatttagtacatagcccagtgcaccggaattgggagcttggaatgtctgtacgtcaacggtgttcattttcactgtgctttccgctcccaagataagtccgttcatggcgatcagtactcctttgtcttttgattctgtggcagcggcagtgactacggcattataaaggtttaacggtccgtcggcacttaatgcggtagacggacgcatggcgcctaccaatactaccggtttatcacttttaacggttagattcagaaaataagcggtttcttccattgtgtccgttccgtgagtaacgacaataccatcgatatccggacgtttcagcagttcgttgattttcttggcaagtgtaagccatacttcatcgttcatgtcctgcgaaccgatttttacgatctgctcacctgtaacgttagcgatctctttgatttccggtacggcgtcaagcagcgcaccgatggccacctgtccggctgtgtaactggttccggtggcagaacttcctgtacctgcaatcgttcctcctgtggcaaggatatgaatattcggttttgcggcaaacgccattgtcacggttaatagtagtgttactgctatcagaccaaatcttttgaattgtttcataactgaatgaagtttaggttaataatatataattagaatatttgtataaaaagcaaccctagtccgatagcaacagccgttgatacaagtccgggcatcatgaatgaatgattcagcacatatctgccgatttttgttgttcccgtacggtcaaaattgatagcggctactacggtagggtagtttggaataaagaaatatccgttcactgcagggaataaggcaatcagcatatagggggagataccgagtgcaatgcctagcggtactagtgcacgtacggtagcggcctggctatataataggatagacatcacaaacagtgcaattccgaaaagccatggcatttgacgtacgataccttcgatggagaaagtcagttgcgccatattaccttgaaggaacgtatctcccatccaggcaataccgaaaatggcgattaccgcttgcattccggcaggaaatacagagccttgtgtagctttgattccgtctgtttttgttagcaataggatgatggcggcagccgacagcatgacgatttcgatgatagaggacattcctaaagtaacgatttcaccatcgataagaaaagacgggcgcatcccttcaaaagagccgaaaagtacgatgaaggcagtagccaacatgaagatgataacagaaatcatagctgaacgtttgttcttgacatccttgatttttattttcttgtcgttgaaaagcccttctttcagacgtttctggtattcgggatcttctgacaggtttttgcccactctcatagaaaacaacgcacctaccaaaacaccggtaatggtagcgggaatcgtaatcttgagaatatcgaacagagtgatgtcgaaaccggccaatagtccgagtaaagcaactgtggctgcagaaatcgggcttgcggtaatcgcttgttgggaagcgataaccgcgataccgagcggacgttccggacggatttttgtttcggtggcaacttccgcaataaccggtaatacggaataggccacatgaccggttccggccacaaaagtaaacaagtaagtcactaatgggcttaacaaagtaacgtgtgacggattcttccgtaataaatgttctgccagcttcaccatataatcgagtccgccggcagcctgcatacaggcggcggctgagataacggctgcaatcattaacattacgtcgataggaggagcggtaggttgcaggccaaaaacgaaggtaagtatcgccaatccgattcctcccatcactccgagaccgattcctcccaagcgtgcaccaataataatggcagtcagaacaaatgctaattgtaatatcataaggttattgcgttaagtttaaagacaaagataagtgatttctttctttgtactttctttttcctgtattaagaacaaaaaagttattgaatggtttttgcatatttattaaaacaataaccttgctggttggttattataagaactaactaaaatgtcattgttataaaacaaccgatatgaaacagaatttatcaacaaaaactcgtacagaaagcgacttgataggtagtcgtgaggtgccggaaagtgcattgtacggagtgcagacactccgtggtattgaaaattttcgcatcagcaaatttcacttgaacgaataccctttgtttattcaggctttggctattacgaagatgggagctgtcgttgccaatcgcaaattggacctgttaacagaagaacaggcagacgccatattgaaagcttgtaaggaagttcttgaaggcaagcatcatgaacaatttccggttgatatgattcaaggtggtgccggaacgactacgaatatgaatgtcaatgaagtgattgccaaccgtgcattggaattgatgggacaccggcgcggagaataccagtattgttctcccaatgaccatgtgaaccgttcccagtctactaatgatgcttatcctaccgctattcacattggtttgtattacactcatctcaaattggtgaagcattttggagaattgatagcttctttccggaaaaaagggaaagagtttgcacatattatcaaaatgggacgtacccaattggaagatgcggtaccgatgacgcttggacaaacttttaatggatttgcaaatattctggagcaggaagtgaagaacctggattttgccgcacaggattttttgacagtcaatatgggagcgacagctattggaaccggaatcacagccgagccggaatatgcggaaatgtgtattgaggctctgtgtaagattacagggctggatataaaattggcggatgatttgattggagcgacttcggatacttcttgtatggtgggttattcggcagcgatgaagcgggtagctgtaaagatgaataagatatgtaatgacttgcggctgttagcgtccggaccgcgttgtgggctgggcgaaattaatttgccggctatgcagccgggctcctccatcatgccaggaaaagtgaatccggtaataccagaagtaatgaatcaggtcgcctataaagtaataggtaacgacctttgtgtgacaatgagtggggaggctgcccagatggaactaaatgcaatggagccggtgatggcgcaatgctgttttgaatccgctgatctgttgatgaatggttttgatactttgcgtactttatgtgtagacggcattactgccaacgaagaaaagtgccgtagggatgttcataatagtatcggggtagtgacagctttgaatccggtaattggttataaaaactctactaagatcgcaaaagaagctttagagacagggaaaggagtgtatgaacttgtattggagcacaatatcctttctaaaaaagacttggataccattctgaaaccggagaatatgattaagccggtgaagttggatattcacccaaatcgttgattggtatttatagtaagtggaattggtttaagatgagaaatcgccgagcggatcgttgatctgttccggtggttttgatgatgtattactttgattttatacgggaataattgctaatttatccggcgaaatggttattgtttattacttcgaaagtggcgaactttgcaatatcatttcttgtaaactaaacaagtaaatttcgaaccaattagaagatataaatatgaatacatttgatgttattattatcggtttcggtaagggaggaaagacccttgcggcagagtttgcaaaacgtgggtggaaagtcgccattgtcgaacgttctgataaaatgcatggagggacgtgtatcaatatcggctgcattccgacaaagacgttggctcatcaggctaaaattgcttccggtatgaagaactcgacatttgaagagagaagagagttttatcgcaatgccattgctgtgaaggagtctgtgacaagtgcgttgagagacaagaattaccataatctggcagatcatcctaatgtaacagtttatacaggtgtgggttcttttgtatctgccgatgtggtttccgtccgtacatctactgaagaaatatggttgacatcaaagcaaatagagggtgtgtcaaaacgtaatttgatgaaaggacaacttttaatctgaaacttgactccctaaatcaatgatgaaaagagccatatcattactcaaaaacagagtttgatatggctcttttataattgttagttacaatctgtaactttttagagtagtcattttagttttgacacaccctcaaccataatctcagcatcactcatacggttgggtttgttacgatgattgggcctcttatccttaattatatatttttcctgttgaaatgtaaattccttgcaaaaatcatcggccatacaataaatctctgtaactttagactttggaaacatagtggtaatcgtttaaatgttataattcagcactataaatttaatacttttatcgctatgtttctaattataagtgaaatatatttattcttatatcgaactcatgtgattttagcaagtggaaatagaatcaattttatttatttctttttatcaagatgtggactggtgaatcctaatttgcgcaatcctttttgtatgtcaggatgctgcatgaacaagttccaaagcagttgtgaacgatagttttcaatcattatggcaataggtccctgatcgatggcaagatactgttgcggataccaattctccgtttcactgaaggcatcgtagaaaccgtagtcaccccatgttttgtccttcttctgatacaggtacttcattacgtctatagattcttccggtgtgtaaacaatggaagaaagagcggcggtcggactaatgactccgtggtcttctttctcattgggagcatgtgcggcataccctttgacagagtagctggcggtcagtccccaacaattttcaccatatcctttgtaattcttgggattgcggatgcaataagcgcgattagctagcgtatagttcttcatttcatcgaagtagttggcatattggtctttcagcccgtttgggtcaagtcccagaaaagaataatgagcccagaaaagaggcccgatgttgccggtctgatatcttaggttcatcggcaggttctcggctgtatgcggcttaacgattgcgccgttttccgcccagccttcgtggtaaacctttgccggaactccgtgtgtaggtgaagcggcagccaaaatatacataatcaaacattcattgaatccacgtacacggaaattcatatcccattgatgttccggactccaatgccagaaaagtacattctccttattcctataccagttccagtccacgtctctccacagcttatccatgcgtgcggcaagttcccgttcttctttgttgccatttgcatagtattggtgtgctgttagtagaccttgtacgaggaaagctgtctctaccaaatccccaccgtcatctttaggactgaacggttttatttttcctgtctctccatcccaccaatgcgggaaagctccgtgaaacttgtcggcccgttctaagaaagagactattttttccattcgtgcaaatccttctgcacgggtgacgtaattccgttctattccggcaataatggccataatgccgaagccgctgccgcctgaagtaataatatgccggtcgttcagtggatagttgctatccacattcaaccgttctcttgccattccgctcaccggttccgctccattccagaaataatcgaaagtgcgtctttgtacgctatccagcaatgcttcttccgagattttctcctcttccagtagcgtgaatgttgccatcttcgtatcccggctgttgccgccgaccatgacttggaactctcccggctcataaacataatcgaggtcgtagttgtagaacttcaaaagctccggtgtgattttgaaagaaatattctttgattctccggctttcaggaatactttttggaatcctttcagttccttcaccggtcgcgtgacacttcctactacatcacggatatatagttgtacggtttcctgtccgtctcgtttccctgtgtttgtaagtgtaacggtggctgtcaattctccatctgtccgaagctgtgaatggctcagttgcagattactgtattcgaactgcgtgtagctgagtccgaagccgaaaggatagagagggtcattgcttacatcaagatagttactacggaatttctcaaaccattttccttcttccagggggcgtcctgtattcttatggttgtagaataaaggagactgtcctacattttgcggaaagctcatagtcagtttaccactcggatttacatctccgaataacacgtcagcaatagccggagccgcttccgtaccgccaaaccatacattcagaatagccggaatatgtttctcttcccaagtcagcgttaacgggcgtccggtgaaaacaacgagtaccaccggcttgcctgtctttgccagttctgccaatagttctttttggacatcgggtatattgaggtcggtacggctactcgattcaccgctcatctcggaagattcgcctaaagccgccacaataacatctgattggcgtgccactttcaatgcctcattcagcaattccttatccgtacggttgtctctgcccaattctctgccgaacatcgtagctcttttttccaactcaggatcggcagtcagattactgccttttgcatagagtacgcgtgcgtctttcccagctacttcccggattccttccaccagagtcatcggtttgttcaaatccacggctacgctccaggtacccggcatattggaacgggtatcggcgagcggaccgataacggcgattttcccggatttctttaagggaagtacttcctgctggttcttcagtaatacaaaactttcagcggcaatcttgcgggcaatctctctgctttcacgggtataaatctctttagccggacggtcggggtcacaaaacttatatgggttatcaaaaagaccgagtttgtatttagcttccagtatccggcggcaggcttggtctatctcttccacattgactttattctctttcagtgactgggataacgtagtcaaaaatccttcgctcaccatgtccatgtcaattcccgctttgagggcacgtgccgatactgtcggcaagtcaccgataccatgcggcaccatttcgctgataccggtatagtccgtcacaacaaaaccgtcaaatttccattgcttgcgtaatatgtctgtcatcagccacttgttggcagtagcaggcacgccgtccacttcgttgaaagatgccatgacacttcccacaccggcttctatcgccgccttatacggatacatatattcgttgaacatacggatgcggctcatatctaccgtgttgtaatctcttccggcgaaaccggcaccatacagggcataatgtttcacacaagccatgatatggttatttgaggtgtatgagttgtctccctgatatccccgtaccatcgctttcgctatttcaccacccaggaaagggtcttctccattcccttcggagacacgtccccaacgggcatcctggctgatgtccaccatcgggctgaatgtccagcagatgccgtccgcacttgcttcaatggcggctatgcgtgccgactgctcgatagcttccatattccaggtggctgccaatcctaaaggaatggggaatacagtctcgtatccgtgaatcacgtccatgccgaatagcaatggaatctttaagcggctttcttctacggcaatacgttgtacgtcgcgtattttagtcactcctttgatgttgaacaagccgccgacttgtcccttacggattttgtcggcgatgttgctgctggttgcctgaccggtagtgatgtctccggcactgggaagattcagttgcccgattttctcttccaatgtcattttgcttatgagttggtcgataaatcggtccatcttttcattctttccgccctgtgcgtggatgcagcaagtagcggtcaagcatactagaatagtgaggattctgttcatatctgttttttacctattgaattgtttattttaagtccgggctgctaaatcctaacttcttcattccgttctgaatatccgggtcggacatgaagaggttccataacagtccgctccggtagttttcaatcatgcagataaccggaccttgattgatagcgatgaattctttgtcgaaccattgcttgcccagattgaatgcgtcaacgaaaccatatttcccccaaatcttatctcctagtttgtaatagaagaaatgcagggctttcattgattcttccggtgtgaaagggaaggaagtcaaggcggcggtaggggcgattacaccattatcattgttcggagaatgggcactgtatccgttatcaccgtcactggcggtcaatccccaacagttctcgccataaccggcatagtctctcggattgtcaacacaataattgtagttaattaatgcatggttccgggtttgttcctcataattggcatatgcgtccgtcaggcctttcgggttaattcccaagaaagaatattgggaaaggaaaagaggaccgccgttatccgtacccagcggcaaaacatagtcataataaacttttccgtttttcattccgccgttgttcgcccatccttcgtcgtaaacaaccttatcaatagcctttgtcggtgaagaagctgcgagcacataggctatcaaaccttcgttccaaccgctgattttcaagtccatctcccagccatgattgcggctccaatgccagtagagcacattttccgagctttctttgcggaaccagttccaatctatggcttcccataatttggtaatgtctgcacagagcttctgttctgcttcattgccgttcttaaaataagccctggcggtcaataatccctgaaaaaggagagatgtctctaataagtccactccgtcgtcaatatcactaaacggttgtatgaaaccgctatctccatatatccagtgtgaataagctccatgataactttcgcatctgcccaagaagtctacaattttctgaatacgttccaatgccgcttccctgctgataaagtttctttctgccgccacgatgattgacataacgccaaagcctgttccaccggttgctactgtatttgttgaagtgcttctttcacgcgccataccacaatcaggatgtccgaaatcccagaaataactgaatgtttgtctctgaaccagcgtcaacaactcttcgtcatcaatacggtcaaacttgtcggaatcttccattcctgtttttatactatacacttttcctgtaaagatgggttcgccgactgctgattttattcccggatacacaacaaacttataatccgaatagttactgagtgcatttaccggagtgacggtcagtttcttattatcagcatccatctgataattaacttttagttcaaactcatcttcaccgtccaattcgatgaaacggatattctttgcgacggtcgattcatctactgcatccgagaattgaagtacgatggaactttccgggtcaacattcgtaaaagccgataagttctgttgttcaccgatactgatagttgttaatcggaaatcggtggttattgtttcattatcgtcactgcaagaggttagtaatgcgatgataataaatagaatatgagtgaatgataaatattttttcatggcatacttagtctttagttacatatagatttcgtatctcgctccttttgagagctttgttgtaaaagtggaactggtcgagtgcgccgaggtagtgtgcgccccaaccttgggcagtagcgccttccgtcaaactaggtactgtttgaaactgcaatgttccgataaccagtttccccacatcgctgaatttgagctttccggaaattatattttgagcttcgccttcagaaagagcttttgaaagaatctcttctgcatttttataaacagtcagtttggaagttgtctcatcatatttgaaagaaagatgtacccagtcattgataaacacatcatctatcctgcactcttcagttcgttcggcattgccgttgcgcagatgaactttgaaaaaggcttgcgtatcgttttccgaatgactttcaagatagatatccaaattaccccagaactgtttggtattggatatcccgaagataccggtcgctttattgcatttggtagctttcatccaaaaagagacagtgaaactacctaaattctcaatactgtctttcattgcttccggagtttcgactaccatataagtatctgtcgcaccttgatacgctttaccgttaataccttccgcaaagtggggagtgccgttggcggtaatgccgaagttatagatactgttgtcctctaaattatcctcgaaagccaatcccaacttcatcgggttataaggcttttccggcagttcttccagataatcgaaacccgggtggtccatatcctggaaacaggactgaaccatgaatccgaggagaaacaaagcgatggatgaatatatatattttttcatatcaatagtcgtttaatatattataggtaatctggattttgtttcaatacgccgttagacttgtctatttcttcttgcgggagcggcaataatgcatgcttcttttgataaccgaaactgcctaatacatcttctgcaattccccagcgtaccaagtcgtagaaacggtcgaattccatagcgagttccgctcttcgttcttgacggatagcgttccgcagtttcacctggtcgtctgtcgtgactttgggcaggatattgatattcttacctctggcacggctgcgtaccatctccagataatctttggcagccttcgtgttgttctgttcgatggctgcttctgctgccatcaacactacatcagcatagcggataaggcggatattgaaccagaaaccgaacttggtatatttagcgcgataagtagggttcgtataagcctttttattgaaatacttggcaatcacatcatttgtggcaaccggcttctcattatagggttgattggcaggaattaacgaaggagattctcctacctttatgaaatacaggagcgtttcatctttgcggggatcaccggcttcaaaggcattcgccaatgtctcggtcggtgtattccaaccccatcccatattccattcaccggaacctctgacgccctgcaccaatgcgaatttactacctatatcttcactttcgggcaaagaagaggtggcggtacattgcagttcgaaaatagactcactgcaattctcaccagattcgcggaatatatcgttgaaaggcgtattcagattgtatattccggagttgatgacatctgttgcggcagtccagaggttagaccagtcgttgcgcatcatatacgtccgagcgtgcagggaacgggcggctccccaagtcaggcgaccgatgtatttgctttcccacgtgcggggcagatacttttccgcttctgtcaagtcccggtctatcagtgcgtatatatcgttgacggacgacttggggatattggcatccgatgactggttaatcttaaagtcaatcaagggaacttcaccgaatgcacgcaccagattgaagtagcaataagcccggaagaagagtgcttccgccttattgacgagattaccatccgtcagattgcccgctttcattgattcgagcagtgtattcactttgtggataaggctgtagttggcgctccagtaaccttgcaacataccgtcacttgcgtcataattgaactcgtcatacatcttggcggcacccgctccgtctgtcgatgtactgcctttttccgcgtcttccgaacggaagctgtggatggcaagtgcggttgttcccgatgtcagggcatagtcgcgcatggcagcgtacattccgaatatttcgctctcgtacgtaccaccgacgaggtcggtgtcgataagttctccttgcggagcctggtccagtaaatcgctgcatcccatttgggcgaatgacaaagtgcaggcagctactatatatagaattctttttttattcatagtcatataactttagaaatgaaattagaaagtaagattcaaaccgaaggtataaacggtcggcatcggataagtgccgttgtctaccccgaaggaagtagcgctaccaccgatttcgggagtgtatccgctgcatttggaccatgttttcaagttctgtacgttggcatataacctgagcgatttcagataaatctttttcaataagcccgggttaaacgtatatcccagttcgatattacggatacggaagaaactgccgtcttcgatgaagtaacttgaattctggcggttgatacttctcgatgggtcaaggataggttcccagttggaagtgccctcaccgttccagcggttcatgcggcggagcgaatagttgttttgggaaaattcgtccgactcccagttacggtaaatctcattaccatatacccccatcatgtccatactgaaatcgaatcctttgtatccggcactgatagtcaggccataggtgaaatcgggggtcggattaccaatcatagtacggtctttgtcattaatctcaccattcccgtctacgtccttgaacttcaggtcacccggtgctacggtactcaatgtatttttaggagagctctgaatatctgccttattctgatatacaccttccacctggtagccgtagaagtaaccgatgggatacccctgggatactcttgatggaccggatacgatggcataatccttgtttaccagtgattttaccttattgtctatcgtggtcaggttggcgctgactccataactccagtcctcgccgatgcggtcattccaggaagcggtcagttcccatcctctgttttggatttccccgatattttccaatccgggagtagagcccgaaataccgggaacggaagtcagcaaatccttggtcgttttgttataataaacgggagacaggcgcaggcgttgtttcagaagattcatttcgaaaccggcttcccatgaatagttgcgttcccagcctaatgtctgcgacgccaggtaagcgagtccttttccttcgacgatgttgtcaccgaatacggcagagccggagttgacgattgtaggataagccggatagttatagccgcctgtattctggctgcctaacacgccccatgaacctttcagtttcagatagtcgatgacagactggtgcttcataaaattctcttccgagattacccatccggcgccgaaagagtagaaattatcccatgtgtttccggtacgcttgaatacggatgaaccgtcgcgacgataagaagcgttgaacaggtagcggctttggtagttgtacagtgccctgatcaggtaagacatggtaaagcgtttgtactgtgaaccgccgtttgtagcagtggactggtcgccgatagtggtaatccaccatttgtcgtcattctcgccaatgctgatgccgtcgcccagtttctggcttctgccggcatccagtgaggaatattcgttgtagttggttgtcataccacctgtcagtgtaatgccgtgtccgccgaattttccggtataagtcagtacatagtcggactgtgcagccatgtttgtcaattttttctgtgtgatgccttcacgttcgcctacattttctttttctcctttatctacattgtacaagtagatgataggagagtagaggcgtgactggtcggaactgtaatccatagcgaatgtggcacggaaagtcaggtttttcagtaagtccacttccccgtagatatttcccgccatgcggtagttgatggccttgttatgctgtcctctgtacttcacgtcaatcatcgggttcgatacctgtgcctgctggaagtccggcaagagttgcagaagtccggtttcttcattggctaccggtgcgatgggagctgccttgatggctgcgctcacgcctttagcgtccggcggaagcatacgtacaccgttaatctggaagccgaaacgcaggaacttagtcatttcgtattcactgtgcagattgatagtcagcttgttcagtttctcgctcttgatagaaccttcttccatggtgtagccaagtcccatgtaaaacttgcttttatccgtagaaccggtgatgctgatattgttgttggtcaggaagcccgtttggaagatttcgttctgccagtcggtgtcggctgcccagttggtatagtcgaacgggtctaatccctggttattacgttgttcgttgtataattccttaaattgggaggcattggtaagttccacacggtcgccgatatgtttgaaacctaccgaagcgttgatgcagacggtagtctgtccttctttggcgcgtttggtcgtgatgataattacgccgtttgcaccccgtacgccgaagatagccagtgaagacgggtctttcagaatctccatagattcgatgtcagcaggattcaggtagttgatgttatccgtgaaaagtccgtctactacatataagggagtatatccgttgatagagtttgttccgcggattctgatttccgggtcttgacccgccctgccggtattgacgatttgaacacccgcaatttttccctggatggaagccaagggattgctggcaggcttggtggctatatcagccgctttgactgtttcgatagaaccggtcaagtctcttttcttcgcgctgccatagccgataacgacagcttcttccaatgcaaaagcttcttctttcatgacgacattgatagtagtacgattgtctactacgatagtttgtgacgtcattccgataaaggagaaagtaattttatcgcctttccgggcagagatgctgtactgaccgtctatgttggtgacggttccggtgccggaagcatctatttgcacggctactccgggcagtggttcgcttgtttctgatgtgacgataccttttatctcccgtatctgtgcggatagagtggtgactgccaataagaaaaatcctaatagaagtcctttctttaatagagagatgtccttacaaaatgaatgggtaagttggtctttcattctattattagttttagtttaacattaaaatcctgtcaaaactttgttgggctcgtacgcttcccgattcgtccgttttgacaatggcaaatgtagaaagtctgaatttatacttgctaaaaacaggctcactacggatacatcgctttgatttttaacatttaagcgacctcattattacctctcattcaattgtaatatgcattaaatgagtaatataacgaatttataacttcaagaagaaattgttgagattctcattgggcgggatattaattttctttctcaaccggtaacggctgttttccactgcacgtacggaaatattcattagggccgcgatagcttttgaatccagattcaacttcaggcaggcacataatttcaaatcgttggcagtcagttgcggataaagcgtttttaattgtttgaaaaatccggtatgtttttcttcaaacttgataagaaacattttccagtcttcctcggtgtcgaggttgttgttgaaaagcatattgattttatggaagagcggtgcgagcgctttgttgttatgtgtgcgatagaactcttctatttcatctttcatctgcgtgataagctcgttgcgctggatgacgaaagaagtctgcgaaagcagttcggcatccttctccttgatttggttttgcagttgctggttcatccggcttagccttttcgcttcgcgaaggcggatttttatcagatgccggttccggtaacggcgcaggatgagtatccagactatccgcaacacgagcaatgcgatgatgaagtagcccagtattgcccagatagtctgataccacggagaaaggatggtgaacgtatattccagtgtgggagagcaattccccagattatctatcgaacgtaataaaaaggtataggttccttttgggagacgttcgtaggtcactttgttgattctttccggttccgaccattcgctgattccttccagtttatattggaaagatacattgtgtgccagtacgtcatccgttgcgaatctgatttctatcgtattattggtaaatggaatcttgatagcctcatgttcactttccttatgaagtgcttctcccgttttggacaaggcggaaaaggatttgatataaggagtggacagcgaaatgacattttgctgctgattgttggggcagagcagaaagccgttgtccagacagatgaggctggttgaatccgtgagggcgataatccgctcgaaatgattgaccatggacatgccgttatagttgatgtctattttatcttctatatggttttgcgaaccgtcgtgggcaatgcggtagattacattatctcccattacataaaaatggtttttgtctatgtcggatacattttttatttccgtcaggttgctcaggcaatgtttcaacggttcgtacagttctactttgccgcctatgtcattataagtgtaaaaggaatttccgcccagcatgacaactcttccgccgattttgaaaaggtggagcttgtagggtagttcccggtcttcgccgtagtattccgaagtttttatttttgtcatgtcctcggaaagctggcaacggtaaactcctttgttcatgtgctccaaccatacattgtcgagatggtctatctggatgttgacgataggctggcgaatgtcgtcaagaatgattcgttgtgtgcgagtatctacgattttcagggatgcgtatgtgcctaacagtagataatgctctttggcaagaatggtaaacactcccccttgtgcattgatgggagtagtaactgtcagttgttcgtcaatcacttttaacccgctgttggaaccgcaatataactttccgtctataatctttaaatcccagatttgctctttaatgttctctattgtttgcaagtcgccaggcaatgcgttgatattgttcagatcgctttggctgatatagaagagtccctggttggtaccgataaatagtttgccggcaaaaagtgcggctgcatatacggcaccggtcttgcccgtaggatcggtgtagcaactgagttcgggaagtatctggatgcaggtaatcccgttgtcgagtgccagccaggtgttatgatacttatcttcgtgaagaaacaggatcgtattgttttgcatgtaggcgtcagagttgatatgcttgataatcttcccttgtctgtctatcatatatactccgttgagaatcgtgccgagcagatagtgaccgttctccttttgaatagcgcaattgatgtttgaattaatccattccggtgcgtcactcagtaatctgaacgtatctccatcatatatgaataagccgctgttcgaagtgactaccagccgttggttttccgcatagggaagcacggctttcacttctttgcccaggaatagttcgctgtgtgggataagggtgaaacgaccttcttgcagacggagcagccccttatgtgtttcctgtatccataactcactgccgacttgcatcaggaaatgaaaattctcctgtttggttattttctctgtttttcctgtcggcaggtggtggcggaagatgccgctgaatgattgaaaatagatggattccccttgcggtaggattctccatatatcatcattctgccaattgtctgtcggcagttctttgctgagtgaggtataagtcagttccccgtcgggctgccgactccatttaccgaactcttcgtaaccgccggtatagatttcgttgtttgaaacagcatatacagaacgcactacttctgctttggggagcttgttcaatttccattcgataccgtcaaattcgagcagtccgatgtcattgccaaaatagagtattccatgctcgtcttcactgatagaccagtttttgttggctgcgccatattgtgttttgctgaagttgatgattaacggattgttgattccggcaaatcctaaactgaaccagagcaggcagatgataaaacaaagtgatttttgcagaaagaacatagtagtacgtttttttgagtgctgatgcaaagatagaaattcttttttttattaatagctttaatgttatgatgttataggaataattgctaacttattcggcaaaatcgttattgtccgttacctcgaaagaagcgacctttgcaatatgaaatgaaacaaactgaaaaagctgattttaaacttataaaaagataggaatatgaatgtatttgatgttataatcattggtttcggcaaaggcgggaagacccttgctgcagagtttgcaaaacgcggacagaaggtagctattatcgaacgttccgaaaaaatgtatggtggcacatgtattaatatcggatgtatcccgacaaagacgttagtacatcaggcaaaaatagcttggggcaggaaagagaccgcctttgaggagaaaagtgatttttaccggcaggcgattgccgtgaaagaaacggtaaccggtgcattacgaaacaagaactatcataacttggcggacaatcccaatgtgactgtttatacaggtacaggctcgtttgtttcttccgatacggtcgcagtccgcacggctacggaagaaatcctgctgacatccaaacaaatcattatcaatacaggagcggaaacggtcattccacccattgacggagtgacggacaatccttttgtctataccagtacttcaatcatggaactgacaaaccttccccgccgtctggtcattgtcggcggcggttatatcgggctggagtttgcgtccatgtatgcttcgttcggttcgcaagtgactgtgctcgaaagctatcccgaactgattgcccgtgaagaccgcgatattgcggcaagcgtaaaagaaacattggagaaaaaaggcattgttttccggatgaatgcaaaggtgcagtcggtgaagcacgaggaagacaaggcaatcgtcgccttcactgatttgcagactaacggggtattcgaacttgacgccgaagccgtattgctggcgacaggtcgcagacctaacacgggaggtcttaatctggaagcggctggagtagaagtagatgtgcgtggtgctatcattgtcgatgaatatttgaaaacaaccaatcccaatatacgtgccgtaggtgatgtgaaaggtggtttgcagttcacttatatctcattggatgattaccggattgtccgtgaggatttattcggagataaggaacgaaagacaaatgaccgtaatcctgttagctactctgtttttatcgatccgccattggcgcgtatcgggctaaatgaagaggaagcctgcaagcagaacttggatattattgtgaagaagctgcccgctatggctataccgagagcgaaaacattaggggagatggacggattactgaaagctatcattgataagaacacgggaaagatattaggttgtatgctttttgcacccgattccggtgaagttatcaatacggttgccattgccatgaaggcagggctggattatacttttctgcgtgacttcatctttactcatcccagtatgagcgaagtgttgaatgatttattttcataatgatagtttcatgtgttggaaaccctggcctttcagtgtgaaacagaaattacccttgattgccgatgtttacaagtgaacaaaaaaacgataatttgtgtttctttaatttaagatgtatatctttgttcccgaattataaacacgtgaatttatgaaaaagatttttggtgctttaatgattgccgcatgtttcggcatggtgatgcctgtccaggcgcaaatacactttggtgtaaaaggaggtttgaacttgtcaaaggcaagtctctctaatgtaggtgataattttaaaaaggataatttcaccggtttctttattgggccgatggccgagtttactattccaattgtaggattgggagtggatgcttctttgcttttcgctcaaagaggtatcaaggtctctgatgaagatggagatataaccgttaaacagaacggcattgatattcctgtaaatctgaaatatactatcgggttgggaaacctggcaggtatttatctagcagcaggtcctgatttttatttcgattttgaaaagaaaacagggatcgataagaagaaagctgaagtaggtattaatgtaggagcaggtttgaagttgctgaatcatttgcaggtaggggctaattacaatatcccattgggggatactgctgatattgatactggcggctcttataaaaccaagacttggcaggtgtctgtagcctacattttttaatcagcctgtcatttttcattgtatataaaaaagagtttctgctcagtgggaactctttttttgttcggggctatcctgttacactcccgaaacagttttcgcccattcctgtcctaagaaacgtttttcttttgagtgttctctttttcttcatttttcattcctcattttttattgtatttttgtacctgcaatgaaaaaatatgtagatgtcattttaccgcttccgcttccgaagagtttcacttactctttgccggacgaatatgcggaagatgtgaagataggctgccgtgtggtagttcctttcgggcgaaagaagttttatacggctatcgtccttaacgttcattattgtgctccaacggggtacgaagtgaaagatatatctgcattgctggatgcttctcccattttactacccgttcagttcaaattttgggaatggatagccaattactatctctgtacacagggagatgtttataaagcggcgcttccttccggtctgaaattggagagtgaaacgattgttgaatataatcccgattttgaggcggatgcgccattgccggaacgggaacaacgcattttggatttacttgccgtagatgcgcagcagtccgtcactaaactggagaaagacagcggcataaaaaatattcttaccgccatcaagtctctgctcgataaagaagccatttttgtaaaggaagaattgaaacgcacttataagcctaagacagaggcacgggtgcggcttgcgggtacggcagatgaaaagcaactccatattctgtttgatattctgtctcgtgctccgaagcaactgacgttgctcatgaagtatgtagagtattcaggtattttaggaaccggaactccgaaagaagtctccaagaaagaattgttgcaacgggctaatgtggccccttcggtactgaacggactggtagataagaagattttcgaaatctactatcacgaaatcggacggttgaataaacaggagaaagaagtggtcgagctgaacgccttgaacgaatttcagcaacgggcacatgatgagatagttcagtctttccaggagaaaaacgtttgtctgcttcatggagtaacgtccagcgggaagacggaagtgtatatccatctgatcgaagaaacgattcgtcagggaaagcaagtcttatatttgttgccggagattgccttgactactcaaattacagaacgtctgcaacgggtcttcggtgctcgcctggggatctaccattctaaattccccgatgccgaacgggttgaaatctggcggaaacaactgggagagaacgggtacgatattatcctgggtgttcgctcttccgtgtttcttcctttccggaatctgggattggtgattgtggacgaagagcacgaaaatacgtataagcaacaagatcctgctccccgctatcatgcccgtagcgcagcgattgtactggctgccatgtacggagctaaaactttgttggggacggctaccccttctatcgagtcgtggcagaatgcaggggaggggaaatatggttttgtacaactgaaagaacgatataaagaaattcaattgccggagattattccggtagatataaaggaattgcatcgcaaaaagaggatggtgggacaattctcaccgctcttgatacaatacatgaaagaggctttggaacaggaagaacaagtgattctctttcagaaccgtcgtgggtttgctccgatggtggagtgtcgtacctgcggttgggtgcccaagtgtaagaattgcgacgtgagccttacctatcataaaggaatcaatcagttaacctgtcattattgcggttatacctaccaactgccgaaatcctgtcctgcctgcgaaggtacggaactggtgaaccgtggctttggtacggaaaagattgaagatgacattaaaatcctttttcccgaagcggcagtggcacgaatggacttggataccacacgcacccgctctgcttatgaaaagattattgcagatttcgaacagggaaagacggatatattgatcggcacgcaaatggtttccaaaggattggatttcgatcatgtcagtattgtaggtatactgaatgccgatacgatgctgaattatccggatttccgttcctatgaacgggctttccagttgatggctcaagtagcgggacgtgccggacgtaagaacaaacggggtagggtggtactgcaaaccaagagcatcgagcatcctatcattcatcaggtcattgccaatgattatgaagacatggtaggcgggcagttggcggaacggcagatgttccattatcctccttattaccggttggtatatgtttatctgaaaaatcataatgaagcgttgttggatcagatggcggtagtgatggcggataagctgcgggcggtatttggcaatcgggtgttggggccggataaacctcctgttgcccgtatccaaacgttgtttatcaaaaagattgtcgtcaagattgagcagaatgctccgatgggacgtgcacgggagcttctactacgcattcagagggaaatgatcgaagacgaacgctataaatctttgatagtttattatgatgtagacccaatgtaatgaaaatgaagaaaatattatttgtctgtttaggaaatatttgccgtagttctacggctgaaggtgtaatgcttcatttgataaaagaagcaggactggagaaagagtttgtgatagattctgccggaatcttgtcttatcatcagggtgaattaccggatagtcggatgcgtgctcacgcggctcgtcgcggttatcaattggtacatcgttcgcgtcctgtccgtacggaagatttttataattttgatctgataatcggtatggacgaccggaacatagaggatctgaaagacaaagctccttctccggaagaatggaagaagattcatcgtatgacggagtactgtactcgtatcccggcagatcatgtccccgacccctattatggaggggctgagggctttgaatatgtgcttgacatacttgaagacgcttgtgcggggctgcttacttctttaactcaggataactgatccgggtgtgataagcaatctttagtttttctttgaatacggctttcacagtggctatatccttgaaagtgataggacattctttaaagtaaccttcagtgacttgggaatcgataatcttgtcgactaggttgctgattgtctcttctgtatattccggaagactgcgtgatgcagcttctacagcgtctgccatcatcaagatggcttgctctttggtgaatggattcggaccgggataggtgaacagttcttcattcagttcttcgtccgggtgctcgttcttccaggaaatatagaaatattttgtttttccccgtccgtgatgagtactgataaagtccttaataaccttaggcagattatgtttgtcggcaagtttcaatccatctgtcacgtgactgatgactacttgcgcactttgttcataacctagatttttatgtggattgactcctcctgattgattttcggtgaagaaagccggattttccattttcccgatatcatgatataaagctccggtacgcaccaactgacttttggcgccgatacggatagctgcttccgctgctagattggctacctgcatggagtgttggaatgttccgggcacagtctcggacatttgacgcagtaagtcgttattaatgtttgaaagctctaccaaagtaacgttggaagtaaatccgaacgttttttccaataagaataataatggataggcgaacagcaataaaattccgttgataaagaaataggtatacatccgtatattcaacttcgagaaatcgttggcaagtccgttttctgtcatcagttcaaaagagaaataaacagcggcgtaggtcagtatgactaataatgccgttcggaaaagctgtgatctctgtgacagttctctcaaactgaatatcgcaaccataccggcagctagctgagtgagaatgaattcatgtggaaagcgtagtgatatggaacagattaatattgtgatgacatgagtcagaaacgcagttctcgaatcaagaaacacgcggataataataggtagcattgcatacggaatgatatacacattgaataggttatgtgtcatcataaaagccgtaacaatactataaaatacaatcaatgtaaagagtagcgacagactgccctttcgctgataataatcttttcggaacaaatcaagatagagcataaagcaaagcattaacatgccgacaaacagaatttgtccgccaagaatcagacggctttgtcccatagattcgtttcgcttgatggactctttacgcagggattccaaaatattataagtttccggactgatgatctcgccccgatcgataattttctgaccactcacaaccaaaccgtttgcccaagaatagttgttcagtatctcctctttggctgtctgagtccgttgttcgtcaaaagtgaggttcgggctgatatattcattcaacgaacactgccgtagaatttccctgttgaagtgaacggagtctgccgtaagtaaatactcgtatgccttctttaccgtgtaaataccttcgatggggtgcgaattggccaacttgtcatctattaccatgatggcggatgtgctatctttgtaaagttgctgtatagcttcggtagatacaatgcccgcctgataaatctctttcagcgtacgttcgatgtagcgtaaataatctgtagaaggaagaatccctttcaggttcgtatgatagttctcttttagtttggctatcgcctccttttcgactttcttgtcgagctcataatagggttggaagagggccatcaggctgtcttgttctcgtttcactatcgcttcatctttataaataggaaaatcgaaagttgcgattaactgtccgtatttccaaggcttgtttatatcaaactgatagttgaacttgccatcgcgcggcaggaaatagacaatcaatgccacagtacctatgaatagcagcgatttatatgacaaatctttccatgaaaagctcttttttttcttcaaatgttccatatccactgaaatttttgcgaaaagtacaaaaaaaaacaatagtgtggaaaaaaaggtttaattttgccgcgatttacctatactaacccaaattatggcagaaagaaaagtaagagttcgttttgctccgagtcctacgggagcattgcacattggtggtgtgcgtacagctttgtataattatctatttgcgcgtcaacacggcggagacttaatatttcgtattgaggatactgattctcaccggtttgttccgggagcggaagagtatatcctcgaatctttcaaatggttgggtatccactttgatgaaggagtgagtttcggtggcgaacacggtccttaccgtcagtcggagcgtcgcgatatctataaaaaatatgtgcaggttctgttggagaacggaaaagcatacattgcttttgatactccagaggaattggatgccaaacgtgcggaaattgcgaacttccagtacgatgcgtctacgcgcggcatgatgcgcaattcattgacaatgccggaagaagaagtagatgcgctgattgcagaaggcaagcagtatgttgtccgtttcaagatagagccgaatgaagatattcgtgtgaacgacttgattcgtggagaagttatcatcaattcatccatccttgatgataaggtcctttacaaatcggctgatgaactgcctacttatcatttggcgaatattgttgacgaccatttgatggaagtttctcatgtgatccgtggtgaggaatggctgccttccgcaccattgcatgtgttgttgtatcgtgctttcggctgggaagatacaatgccggaatttgctcacttgcctttattgttgaaaccggaaggaaatggaaaattgagcaaacgtgacggtgaccgtttgggattccctgtgttcccgttagaatggcacgatccgaaatccggagaaatatcttcgggctaccgtgagtccggttatttgccggaagcggtgatcaacttccttgccttgttgggttggaatccgggtaacgatcaggaagtaatgtcgatggaggaattgataaagctgtttgatcttcatcgttgcagcaagtcgggagccaaattcgattataaaaaaggtatatggttcaaccatcaatatatacagcagaaacctaatgaagaaattgcggaactgttcttgccatttttgaaagaacaaggtgtggaagttcctttcgaaaaggtggtgacagtagttggcatgatgaaagaccgtgtcagtttcattaaagaattatggggtgtatgtagcttcttcttcgtagctcctaccgaatatgatgaaaagacggtgaagaaacgctggaaagaggattctgcaaaatgtatgactgaactggcggaagtcattgccggtatcgaggacttcagtatcgaagaacaggagaaagtcgttatggactggattgcagagaaaggttaccatacaggtaatatcatgaatgcctttcgtctgacattggtgggcgaaggaaaaggcccgcatatgttcgatatttcctgggtattgggtaaagaagaaacaatagctcgtatcaaacgtgcggttgaggttttgaagtaatcgacatagtactatgctttacaacctggcaatagtcatttatgactttatcgttcatctggccgcaccgttcagccgcaagccccgtaagatgatgaaggggcattgggtggtgtacgaacttttgcgccagcaggtggaaaagggggaacagtatatctggttccacgccgcttcattgggagaatttgagcaggggcgtccgttgatagaaatgattcgggcaaaatatcctgcttataagatattgctgactttcttttctccttcgggctatgaggtgcgcaagcattatcggggagcggatattgtctgctacctgccgtttgataaaccccggaatgtgaggaagttccttgatatcactaatccgtgtatggcgttctttatcaaatatgagttttggaagaattatctggatgagcttcacaagcgctggattccggtatatagtgtgtcgtctattttccgccgcgaccaagtgttttttaaatggtatggcggtgcctatcgcaatgtcctgaaagatttcgaccatctgtttgtgcaaaacgaggcttccaaacgttatctgtcgaagattggcattctccgtgtaacagtggtgggagatacccgtttcgacagggtactgcaaatacgtgaggaggcgaaagcccttccgctggtggagaagttcaaaggaaacaatgctttcacttttgttgccggcagttcgtggggaccggatgaagatctgtttctcgaatatttcaataatcatccggaaatgaaactgattatcgctccgcatgtgattgacgagaatcatctggtggagattattggtaagttgaaacgtccgtatgtgcgctatactcgtgccgatgaaaaaaatgtattgaaagcggattgtctgattatcgattgcttcggcttactgtcttccatctaccgctacggagagattgcttatattggtggcggtttcggtgttggtattcataatacgctggaagctgccgtgtatggtatccctgtcattttcgggccgaagtatcagaaatttatggaagccgtggaactgttggaagcgaaaggtgcttactccatcaaagattacgaagaactgaaaagcctgttagaccgtttccagacagacaaagactttttagacgagacgggaaagaatgccggatattatgtgaccagtaagtccggtgcgacggaaaaaatcatgaatatgattaatttttgatgtttctataaaaagatagcgggagactcttaccgaaaagagtctcccgctatctttttataagtcatctgtaaaactggcttattcttctttataccattgcgaatacatcaaataattgtgggcaatcttctcgttcagttcctttgcctgctccgggtctactttcttgatgaacttggcaggtacgccgccccagatgcttccgggttcaatcacagtattgcttagtaccagcgatccggccgctacgattgctccttcacccactacgacatgatctaaaatagtagagcccatgccgactaatgcataatctttgatggtcgctccgtgaatggtaacattatgtcccacagaaacatggtcgccgatttcaatagtcgatttctggtataatgtatgcaagacacttccgtcttggatgttaacaccattaccgatccgtatagagttgacatctccccgtagcacggtactgaaccagacgctacagtcatttcctatctttacatctcctataatagttgcattgtctgcgagaaaacagttttctccgatttcgggagtgaatccgcgtactgattttattaaagccatgagatttgtttgatttaataatgttttttagttgatactatattatgttgcccgacacccgggtgccagatatcttatctttaaatagaagtagtggctttctgtaaccaagctttttcttcttcgttaagatccggagatagcttttcgtaaacagtctgatgataattattcagccattcgatttcctcctttgtcaacatctccttgatgatcccctttttgcagataggacataaagtgatagtctcaaatttaagatattctccaaacattccctctccatctttgcagactaacgtcagattctccgtacgtatcccatgactgcctgtcttataaacaccgggttcgttggatgtaaccatgccgggctggagaattacagggctttcattcatgcgaatgctttgtggcccttcgtgtacactcaagaaatgcccgacaccgtgccctgtgccatggaggaagttcattctgtgattccaaataggcatacgagccagtacatcgagttgcgcaccgcgggttccggctgggaatttggccatagccaatgctatgtgtccctttaatattaaggtataatccgttttttcctcttccgtcagttcgcctaatgcgatggtacgagtgatgtcagtggttccgtccaagtattgtgcccctgaatctaagagtaggaatcctttaggttgaagagttacatcgctttccggtgttgccgaataatgcacgattgctccgtgttttttatatcctgcaatggtgtcgaaactttctcccatgtagagaggttgtgctgccctgaactcatacaattttttatctatacttaattcggtttcttttccggcagatacagattcttccagccacttgaggaatctgacaagtgccactccatcccgttgcatggcagcatggatgccggctatttcctgttcattgcgaatggctttcaataatgtgacgggagactcgccacgaataatggaacatttcggatggatggccgagtaaatcgcgtaattcgtttttcgtggatcaataagaatattttctccgtggaaggaatttaggaatgtctctacttcatcatatttctgtattcctatttgttgtttctttagataagtctcgacctccggcgtcactttttccggtgaaataaagtaagtcacctcatcctgtgtaattaacaggtaactcactatgactggattgcaatgtacatcgtttcctcgtagattgagagtccatgctatttcgtccagtgcagatatgaataaagcgtagacgcctttcttcctcaactcctcacggatggcggatattttttcttcgcagctttttcctgcatatttgatatcataaataaaggctggagagtcaggtatggagggacggtctttccagatgttttttaatggatctccaaatatatctacctgtaactgatgcgccgctagttcttctttcatttgttctacctgttgcacagagaacattttcccgtcgatgcttacagattctccgggttttaagtgctggcagagaaactctgttatgcttggagtttccggcagcatctctttgtagagtgtgatgccgctaccttccagctctttctctgcctgaaggaagtaacgtgagtcggtccataatcccgcttcgtccatcaggatgaccgctgttcctgcggaacccgtaaaaccggaaatccattcgcgtgacatccagtggggagccacatactcactaaggtgagggtcggtgctagggataatgaatgctttgatgtaattgggggggagtgtcatgcgcagagcatgtactcgttcttttatgttctgtttcataccttattatattattatagacatataaatgtttcaaaggtactaactttctgcatttaatgacctgtttatgaatagtttttgagaaatatttgccgaaagttttgtgaataaagaaagtatgtgtaattttgcggcgcaatttgactgcggaatttttttaatcataacatattaatagtaacaaaatgattgtagtacctgtaaaagaaggcgaaaacattgaaaaagcgctgaagaagttcaaaagaaaatttgagaaaactggcattgtgaaagaattgagaagcagacagcagtttgacaaaccgtctgtaactaaaagacttaagaaagaacgtgcagtttacgtacaacaacttcagcaaatagaagattaataattcgtaatttcctttgaattattgaattcttttcatacattcgttgcacgatttagatgtagcgattatgttgatagaatcttttcttgattatctccggtatgagcggaattattctgataaaaccgttcttgcgtatggtgaggatataaggcaattacaggagtttgctcaggaagagtatggggaatttgatccgttggaggtcgaggctgaactgattcgtgaatggattgtttcattgatggataagggatatacctcaacttctgtaaatcgcaagttaagtacgctccggacattttataagtttcttttgaagaaaggagaggtgacggtagatccattacgaaaaatagtgggacctaaaaataaaaaaccgttgccggtattcctaaaagaaaatgaaatgaataaattgctggatgagacggactttggcgaggggtttaaaggttgtcgggatcgattaattattgaaatgttttatgctaccggcatgaggctttcggaattgatagatttggatgataaagatgtggatttctcaggatcttgcctgaaagtgaccgggaaaagaaacaagcagcggttgattccgttcggtgatgaactgcgggattggatgcttgggtatattgatgtaagaaacgaaatgattccggaaaggtcggaggctttttttgtaagagagaacggcgaacggctttataagaatctggtctataatttagtgaaacggaacctgtcaaaggtggcgacgctgaaaaaaaagagtcctcacgtgttgaggcatacttttgcaaccacaatgctgaataataacgcggagttgggtgcagtaaaggaacttttgggtcacgagagtataacaacgaccgagatctatacgcatgccacatttgaagaacttaaaaaagtgtataaacaggctcatccaagagcctaaaaaaaggaggtaagtatggatattagaattcaatcaattcactttgatgcgtcagagcaattgcaggcatttattcagaaaaaagtgtctaagttggaaaaatattacgaagatataaagaaagtagaggtgtcattaaaggtaattaagccggaagttgctgcaaataaagaagcaggtattaaaatacttgtccctaacggggaattttatgctagcaaagtgtgtgatacgtttgaagaagcgattgatttggatgtggaagcactcgaaaaacaactggttaagtacaaggaaaaacagcgtagcaaataaaaaaatcccaaatattttgcgggaaagaaataaataactaaatttgcagccgtttcgctcgcgttagaacgtgacggttgcattttttagctagaacgcctctttagctcagttggccagagcacgtgatttgtaatctcggggtcgttggttcgaatccgacaagaggctcaaagaagtggaaagttgagaatggaaaattgagagttctatgcgaaatttgaaacttcaattgaaaataataaggagaactgaggtgggaagaattcctcaactctacattctccacttgtttaagggcaaataccagagtggccaaatggggcagactgtaaatctgctggcttacgccttcggtggttcgaatccatctttgcccacgatcagagtgacaactttggcaagaatgcggaagtagctcagttgatagagcattagccttccaagctgagggtcgcgggtttgagccccgtcttccgctcttttttcttgctgttatagctcagtggtagagcacttccttggtaaggaagaggtcccgggttcaaatcccggtaacagctcataaagatgtaaatgctgattattaatcaaataaataacaagtaaagctatggctaaagagaaatttgaacgtaccaaaccgcacgtaaacattggtacaatcggtcacgtagaccacggtaagacaacgttgacagctgctatcactacagtgttggcaaagaaaggtctttctgagttgcgttctttcgattctatcgacaacgctcctgaagaaaaggaaagaggtattactatcaatacttcacacgttgagtatgaaacagctaaccgtcactacgcacacgttgactgtccgggacacgccgactatgtaaagaacatggttactggtgctgctcagatggacggtgctatcatcgtttgtgctgcaactgatggtccgatgcctcagactcgcgaacatatcttgttggctcgtcaggtaaacgtacctcgtctggttgtattcttgaacaagtgcgatatggttgatgatgaagaaatgttggaactcgttgaaatggaaatgagagaacttctttctttctatgatttcgatggtgacaatactcctatcatccgtggttctgctcttggcgcattgaatggtgttgaaaagtgggaagataaagtgatggaattgatggaagctgttgatacttggattccattgcctccgcgtgatgttgataaaccattcttgatgccggttgaagacgtgttctctatcacaggtcgtggtactgtagcaacaggtcgtatcgaaacaggtgttatccacgtaggtgacgaaatcgaaatccttggtttgggtgaagataagaaatcagttgtaactggtgttgaaatgttccgtaaactgttggatcagggtgaagctggtgataacgtaggtttgttgcttcgtggtatcgacaagaacgaaatcaaacgtggtatggttctttgtaaaccgggtcagattaaaccgcattctaaattcaaagctgaggtttatatcttgaagaaagaagaaggtggtcgtcacactccgttccacaacaaataccgtcctcagttctacttgcgtactatggactgtacaggtgaaatcactttgccggaaggaactgaaatggtaatgccgggtgataacgtaactatcacagttgagttgatctaccctgtagcattgaatccgggtcttcgtttcgctatccgtgaaggtggacgtacggtaggtgctggtcagattacagaaattcttgactaatacacaataattaatcagttcccggttctttatcgggaactgattatgtacacacgggagtagctcagttggtagagcaccggtctccaaaaccgggtgtcgggagttcgagcctctcctcccgtgctaatattattgaaatgaaaaaggtaatagcttatattaaagaatcttacgacgaacttgttcataaagtttcgtggcctacgtattctgaacttgctaacagtgcagtagttgttttatatgcttccctgcttattgcattggtagtatggggtatggatgtctgtttccagaacttcatggaaaaaattgtttatccacattaaaaaataggaattgaaaatggctgagattgagaagaaatggtacgttctgcgtgctattagcggaaaagaagctaaggttaaggaataccttgaagctgacattaaaaacagcgaccttggtgaatatgtatctcaggtattgattcctactgaaaaagtttaccaggttcgcaatggtaaaaaaattgtgaaggaaagaagttatcttcctggttacgttttggtggaggctgctttggttggtgaggtttctcatcacttgcgcaatactccgaatgtgataggctttttaggcggctccgagaaaccggtgcctctcagacaatcagaagtgaatcgtatacttggtacagtggacgaattgcaggaaacgggtgaagaactcaatattccgtacgtggttggtgaaactgttaaagttacttttggtcctttcagcggattcagtggtatcattgaagaggtgaatagcgaaaaaaagaaactaaaggtcatggtaaagatattcgggcgcaaaacaccgcttgaattgggctttatgcaagtggaaaaggaataacgcggaattgttacgctgttgttgttcttcgtttaatgtttatatataaatcaataaaaaaatggctaaagaagttgctggactaatcaaattacagattaaaggaggcgctgcaaatccatcacctcccgttggacctgctttgggttctaagggtatcaatatcatggaattttgcaagcaattcaatgccagaacccaagacaaggcaggtaagattttacctgttatcattacttactacgcagataagtctttcgattttgtaatcaagactcctcccgttgccattcagttgcttgaaatggctaaggtaaagagtggttctgctgagcctaaccgtaagaaagttgccgagcttacttgggaacaggttcgtacgattgctcaggacaaaatggttgacttgaactgttttactgtggaagctgccatgagaatggttgcaggtacagctagaagtatgggtatcgctgtaaaaggggagttcccggttaataactaataaacttcaattgtaatgggtaaactgacaaaaaatcaaaagttagctgcagaaaagattgaagcagggaaagcatactcactgaaagaggctgcatctttggtaaaggaaatcactttttccaaatttgatgcttcattggatattgatgtacgtttaggtgtcgatccacgtaaagctaaccagatggtgagaggtgttgtttcacttcctcatggtactggtaaacaagtacgtgtgttggtactttgtacaccagatgctgaagctgctgcaaaagaagctggtgctgactatgttggtcttgacgaatatattgaaaagatcaaaggtggatggactgatattgatgtgattatcactatgccatctatcatgggtaaaattggtgcactcggtcgtgtacttggtcctcgtggattgatgccgaacccgaagagtggtactgtaactatggatgttgctaaagctgtaaaagaagtaaaacaaggtaagattgactttaaagttgataagagcggtatcgttcatacttctatcggtaaggtatcattcagtcctgatcagattcgcgacaatgcgaaggagttcatctctacactgaacaagctgaaaccgaccgcagcaaagggtacatatattaagagtatttatctttctagtacaatgagtgcgggtatcaaaatcgacccgaaatcagtggatgaaatctaataaaacagagaaataatgagaaaggaagataaaagtacgattatagagcaaattgctgctacagtaaaggaatatggtcacttctatttggtagacgttacagcgatggacgctactgctacaagcgcactgagaagagattgttttaaatcaggcatcaaattgatggtggttaaaaacaccttgcttcacaaagcacttgaaagcctggaagaagacttttcacctctttacgattctttgaagggtactactgctgttatgttttgcaacactgcaaacgttcctgcaaaacttatcaaggataaagcgaaagacggtattcccggactgaaagctgcatatgcagaagaaagcttctacattggtgcagatcaattggatgctctcgttgcaatcaagagtaagaatgaagttatcgccgatatcgttgcattgttgcaatctccggccaagaatgttatttctgctcttcaatcaggtggtaacacccttcacggagttctcaagactcttggtgagagacccgaataattttcaaaaacaacaaagtatttaaacaattaaaatcatacaaaaaatggcagatttgaaagcttttgcagaacaattagttaacttgacagtaaaagaagttaatgaacttgcaactatccttaaagaagaatacggtattgaacctgctgctgcagctgtagctgttgctgctggtcctgcagctggtgctgctgccgcagaagaaaaaacttctttcgacgtagtattgaagagcgctggtgcagctaaacttcaagtagttaaggccgttaaggaagcttgtggtcttggtttgaaagaagctaaagacttggtagacggtgctcctagcacagttaaagaaggtttggctaaagacgaagcagaatcattgaagaaaacattggaagaagctggagctgaagttgaacttaaataacattggcctggtaatcaggtaattcggttaggaatccttcgcaagaggattcttaacctttttgtgtatatatttcaaattaagttctccaaattcattaatagatgtcttcaaatactgtaaatcaaagagttaattttgcttcgactaagaatccgctcgaatatccggatttcctggaagtacaattgaagtcattccaagactttctacaattagataccccgcccgaaaaacgtaagaatgagggattgtataaagtatttgctgaaaacttccctattgccgatactagaaacaattttgttcttgagtttctggattattatattgatccgccgcgttataccatcgatgattgtatagagcgtgggctcacttatagtgttcctttgaaagcgaaacttaagctttactgtaccgatcccgatcacgaggattttgatacagtgattcaggacgtattcctcggccctattccttatatgactgataaggctactttcgttatcaacggtgccgaacgagtagttgtatcgcagcttcaccgttctccgggtgtgttcttcggtcagagtgtacatgccaatggtacgaaactttattcggctcgtattattccgtttaagggttcgtggatcgagtttgctactgacatcaataatgtgatgtacgcatacatcgaccgtaagaagaaattgccggtaactactttgttacgtgcgattggcttcgagaatgacaaagatatccttgagattttcaaccttgcggaggacgtgaaggttaacaagacaaatctgaagaaagtgttgggccgtaaattggctgcacgtgtcttgaaaacatggattgaagatttcgttgatgaagataccggtgaagtggtttctatcgaacgtaacgaagttattatcgaccgtgaaaccgtactggaagaagagcatattgatgaaattcttgaatcgggagttcagaacattctgttgcataaggatgagccgaaccagtccgattattctatcatatataatacattgcagaaggacccgagtaactcggaaaaagaggctgtgttgtatatctaccgtcagttgcgtaatgccgatccggctgatgatgcaagtgcacgtgaagttatcaacaacctgttcttctcggaaaaacgatatgaccttggtgatgtaggtcgttacagaatcaataagaaattgaatctgacgactgatatggaggtgcgtgtcctcactaaggaagatattattgaaatcattaagtatctgattgagttgattaactcaaaggcagatgtagatgatattgatcacttgagtaaccgccgtgtgcgtacagtaggcgaacagctttccaatcagtttgctgttggtttggctcgtatgtcccgtacgattcgtgagcgtatgaacgttcgtgataatgaggtgtttactccgattgatttgattaatgcgaagactatttcttctgtaatcaattcattcttcggaacgaatgcactgtctcagtttatggaccagacaaacccattggctgaaattacgcataaacgccgtatgtctgcgttaggtcccggtggtctttcccgtgaacgtgccggatttgaggttcgtgacgttcactacacacattatggtcgtctttgtccgattgagactcctgaaggtccgaacatcggtttgatttcttcattgtgtgtattcgctaagattaatgatcttggatttattgaaactccttaccgtaaggtagaaaatggaaaagtggatctttctgaaaacggtttggtttatctgacggccgaagaagaagaagaaaagattattgcacagggtaatgctccgttgaatgacgacggtacatttgtgcgtaataaagttaaatctcgtcaggatgctgacttcccggttgttgaaccgtctgaagttaacctgatggatgtatctcctcagcagattgcctctattgccgcttcattgattccgttcttggaacatgatgatgctaaccgtgcattgatgggatctaacatgatgcgccaggcagttcctctgttgagaagtgaagcgccgattgtaggtacaggtatcgaacgtcagttggtaagagactcccgtacgcagattactgcagaaggagatggtgttgttgactacgtggatgctactactattcgtattttgtatgaccgtacggaagacgaagagttcgtaagtttcgaacctgccttgaaggaatatagaatacctaagttccgtaagactaaccagaacatgacgattgacttgcgtccgatctgcgacaagggccaacgggtgaaaaagggtgatatcctgaccgaaggttattctacagaaaagggtgagctggcattgggtaagaacctgttggtggcttatatgccttggaagggatataactatgaggatgctattgtattgaacgagcgcgttgtacgtgaagatctgttgacttcagttcacgtagaagaatattctctcgaagttcgtgaaacgaaacgtggtatggaagaattgacttctgatatcccgaacgtcagtgaagaggcaactaaggacttggacgaaaacggtatcgtaagaatcggtgcccgtatcgagccgggtgatatcatgatcggtaagattactccgaaaggtgaatctgatccttctcccgaagaaaaactgcttcgtgcgatctttggtgataaggccggtgatgtgaaggacgcttctttgaaggcatctccttctctgaaaggcgttgttatcgataagaaattgttctcacgtgtgatcaagaaccgtagctctaagttggcagacaaggcactgttgcctaagattgatgatgagtttgaatctaaggttgcagacttgaaacgcattttggttaagaaactgatgactttgacagaaggcaaggtttctcagggcgtgaaagactacttgggggcggaagtgattgctaagggagcgaagttcagtgcatctgattttgattcacttgactttacttctatccagttgagtaactggaccagtgatgagcatgctaacggtatgattcgcgacttggtgatgaatttcatcaagaaatataaagaactggatgcggaactgaagcgtaagaagtttgcgattaccattggtgatgagcttcctgctggtattatccagatggcaaaagtatatattgctaagaagcgtaagatcggtgtgggtgataagatggcaggtcgccatggtaacaagggtattgtatcccgtgttgttcgtcaggaagatatgccgttcttggcagatggtactccggtcgacattgtattgaatccgttgggtgtgccttctcgtatgaatatcggtcagatttttgaagctgtacttggacgtgccggaaaaacattgggcgttaaatttgctactcctatcttcgatggtgctacaatggaggatctgaacgaatggacagacaaggcaggactgccgcgttactgtaaaacgtatctttgtgacggtggtacaggtgagcaatttgaccagccggcaactgtaggtgtaacttatatgttgaagttgggccacatggttgaagacaagatgcatgctcgttctatcggtccgtactcattgattactcagcaacctcttggtggtaaagcgcagttcggtggtcagcgtttcggagaaatggaggtttgggcactcgaaggttttggtgctgctcatatcctgcaggaaatccttactatcaaatctgatgacgtggtaggacgttcgaaagcttatgaagcaattgtgaaaggtgaaccgatgccgcaacctggtattccggaatccttgaacgtattgttgcacgagttgagaggattaggtttgagtatcaacttggaataattaataaattgggaattgaaaattgagaactgaaaatggagagtttttagttttcagttttcattcttcggtttcttaatttttaatttttaattttccattttcaattaaatatagagtatggcttttagaaaagaaaataagacgaaaagtaatttctcgaagatctcaattggtctggcttctccggaagaaatccttgagaattcgagtggtgaagttttgaagcctgaaaccattaattaccgtacgtacaaacccgaacgtgatggtttgttttgcgagcgcattttcggtcctatcaaggattatgaatgtcattgcggtaaatacaagcgtatccgttataaaggtatcgtctgcgaccgttgtggtgtggaagttactgagaagaaagtacgccgtgaacgtatgggacatatccagttggttgtgccggtggctcatatttggtatttccgttcgctccctaataaaatcggttatctgctcggattgccgacaaagaaactggattcgattatatactacgaacgttacgttgttattcagccgggtgtaaaagctgaagacggtgtagctgaatatgatttgctttctgaagaagaatatctggatattctggatacacttccaaaagacaatcaatatcttgaagatactgatccgaacaagtttgttgcaaagatgggtgctgaagctatctatgatttgctggcccgtctggatttggatgctttgtcttacgaattgcgtcaccgtgcaggtaacgatgcttcacagcaacgtaagaatgaagctttgaaacgtcttcaggtagtagaatcgttccgtgcatcacgtggacgtaacaaaccggaatggatgattgtacgtatcgtaccagttatcccgcccgaacttcgtccgttggttccgttggatggtggccgttttgctacctctgacttgaacgacctttatcgtcgtgtgattatccgtaataaccgtctgaaacgactgatcgaaatcaaggctccggaagtgatcttgcgtaatgaaaaacgtatgcttcaggaatctgtagattctttgttcgacaactcacgtaagtcaagtgctgtgaagacagacgccaaccgcccgttgaagtcattgtctgacagtttgaaaggtaaacaaggacgtttccgtcagaacttgctgggtaagcgtgttgactactctgcccgttcggtaattgttgttggtccggaattgaagatgggtgaatgcggtattcctaaattgatggctgccgaattgtacaagccgtttattatccgtaaacttatcgagcgcggtatcgttaagactgtgaagtctgccaagaagatcgttgaccgcaaggaaccggtgatttgggatattctggaacatgtaatgaaaggacatccggtactgttgaaccgtgctccgacattgcaccgtttgggtattcaggctttccagcctaagatgatcgaaggtaaagctatccagttgcacccgttggcatgtacggcattcaacgctgactttgacggtgaccagatggctgttcacttgcctttgagtaatgaagcaattctggaagcacaaatgttgatgcttcaatcacataatatattgaacccggcaaacggtgcgcctattactgtgcctgcacaagatatggttcttggtttgtactatattactaagttgcgtgccggtgcgaaaggtgaaggtttgacattctacggaccggaagaggcgttgatcgcttacaatgaaggtaaggtagatatccatgctccggtaaaagttatcgtgaaagacgttgatgaaaatggtaacattgtagacgtaatgcgcgaaacttcagtaggacgtgtgattgttaatgaaatcgttccgcctgaagccggttatatcaatacaatcatctctaagaaatctcttcgtgatattattagtgatgtaatcaaggtatgtggtgtggctaaggctgccgacttcctggatggaatcaagaacttaggttatcagatggcgttcaagggtggtttgtcattcaacttgggtgatattatcattccggaggaaaaagagaccttggtgcagaaaggttacgacgaagtagaacaagtcgtaaacaactataatatgggtttcattaccaataacgaacgttacaatcaggtgatcgatatttggacacatgtaaactctgagttgtctaatatcctgatgaagacaatttcttcggatgatcagggattcaactctgtatatatgatgcttgactcaggtgcccgtggttctaaagagcagattcgtcagttgtcaggtatgcgtggtttgatggcaaaaccgcagaaagcaggtgcagaaggtggtcagatcattgagaacccgatcttgtcgaactttaaagaaggactttcggtgttggagtactttatctctacccacggtgctcgtaaaggtttggcggataccgctttgaaaactgccgatgccggttatctgactcgtcgtctggtagacgtatcacacgatgtgattattacagaagaagactgcggtacacttcgtggattggtttgtacagaccttaagaataacgatgaagttattgctactctgtacgaacgtatcttgggacgtgtttccgtacatgatattattcatcctacaacaggagaactgcttgttgccggtggtgaggaaattacagaagagattgccaagaagattcaggattctccgatcgaaagtgttgaaattcgctcggtactgacttgtgaggctaagaagggtgtttgtgctaaatgttacggacgtaacttggctacgagccgcatggttcagaagggtgaggctgtcggtgtaatcgcagctcagtctatcggtgagccgggtacacagttgacattgcgtacattccacgccggtggtactgctgccaatatcgctgctaatgcaagtatcgttgctaaaaacaatgcacgtcttgaatttgaagagttgcgtacggtagatattgtagatgagatgggtgaatctgcaaaagtggtagtaggtcgtttggctgaagttcgttttgtagatgtaaataccggtattgttctttctactcataacgttccttacggttcaacgctgtatgtaggcgatggtgaattggtagaaaaaggcaagatgattgctaagtgggacccgttcaacgctgtaatcattactgaagcaaccggtaagatcgaatttgagggcgtgatagaaaacgttacttataaggttgaatcggatgaagctacaggtcttcgtgaaattattattattgaatccaaagataagacaaaagtaccttcggctcatatcttgacagaagacggtgatctgattcgtacttataacttgccggtaggtggtcacgtgatcatcgaaaatggtcagaaagtgaaggccggtgaggttatcgtgaagattccgcgtgccgtaggtaaggcgggtgatatcacgggtggtcttcctcgtgttactgaattgtttgaagctcgtaacccgtccaatcctgctgtcgtttctgaaatcgacggtgaggtgacaatgggtaagatcaagcgtggtaaccgtgagattatcgtaacttctaagactggtgaggttaagaaatacttggtagcattgtctaagcagatccttgtacaggaaaatgactatgtacgtgcaggtactccgttgtctgacggtgctattactccggcggatatcttggctattaaaggtcctacggctgtacaggaatatatcgtgaatgaagttcaggatgtataccgtctgcaaggtgtgaagatcaatgataagcattttgagattatcgtgcgtcagatgatgcgtaaggtacagattgacgaaccaggtgatactcgtttcttggaacaacaggttgtagataaacttgagtttatggaagaaaacgatcgtatctggggtaagaaagtcgtggttgatgcaggtgattctcagaatatgcaagccggtcagattgtgactgcccgtaagttgcgtgatgagaatagtatgctgaaacgtcgtgacttgaaacctgttgaggttcgtgatgcggtagccgcaacttctactcagattcttcaaggtattacacgtgctgctttgcagacttcaagctttatgtcggctgcttccttccaggaaacaacgaaggtattgaatgaggctgctattaacggcaaggttgataaactggagggtatgaaagagaacgttatttgcggtcacttgattccggcaggtaccggccagcgtgaatttgaaaaacttattgttggttcaaaagaagagtatgaccgtatcttggctaacaagaaaacggtactcgactacaatgaagtagaataatacaattcaattgactagataaaggaggagcgattgcctgatgaggtagttgctccttttttttgatcttgaaggtaattggttgtggagggaaacgtatcagatagtctgattgtacatagagtttttttcattacttttgtacaaagtatataggtatttgattaatccttgaataataatgcgacaatcatgaaaaagttctgtttcttgtttatcaattcttctagtctctggtattttggcgagtgaaacagattataccaaagggcaatatattcggtttcactacgccattggaaagtcagaatatgtcttggaacttcaacccgatgcaggaccttggttggctactcatatctgggaatattatgactatacaagggatttgaattttttgaaagagacaggatatgaactgatcaagagtagtgcggattttgaggttgatatgatatgggagaataatcagttgaaagaagccacggtacgttccggtgcgggaggaaattgtgtgataaagtatgggaataaaatgttgtcctttaaaaacataaaagggcaaagttatcagctaaaatatgatgtggctaaaggattgatgaaagaaaaatgagagtatagtcttttctgagtgtacggaaaatgaaatcccggcgaaactttgatcgtttcgtcgggattactgtattgagatattgtttattagctcttatttgcacgtttgcgttctatctcgtctagaattactttacgcatacgcattgctttcggagtaacttctacatattcatcctccttgatatattccaatgcttcttcaagagagaattgaactggaggaatcaaacgtgccttttcatcggaaccggaagcacgcatattcgtcaacttcttcgatttggtaacgttgataaccaggtcattgtcgtgagaatgttcgcctaccacttgtccggcatacacttcgtcttgcgggaatatgaagaacttgccgcgatcctgcaatttgtcgattgcataagcaaaagctgttccgctttccatagcgatcatggaaccgttggtacgacgttctatctctcctttgaatggctgatattctttgaaacggtgagccataatcgcttcaccggcagaagcagtcaatacattcgttcgcaagccgataataccgcgtgagggcatgtcaaactcaagattgatacgttcgccggtattttccatcttgaccatctcacccttacggcgtgtcaccatatcaatgatcttgcttgaatactcttccggtacgttgatagtcaattcttcaatcggttcacatttgacaccatcaatctctttgaaaataacttgcggctgccccacttggagttcatatccctcgcggcgcatcgtctcgatcagtacggaaaggtgaagtacaccacgtccggaaacgatccatttaccatcttcctcacttttctttacgcgaagagccaagtttttatctagttctttcatcaagcggtcgtggatatgacgtgaagtcacaaacttaccgtctttgccgaagaacggagaatcgttaatggtgaacaacatactcatggtcggttcatcaatagcgattggcggcaaagcttccggattttcgaagtcgcaaacagtatctccgatctcaaatccgtcgatacctaccaatgcgcaaatatctcccgatgagacttctgtcgttttcacacggcccagaccttcgaaaacatgaagctccttaattttagtcttgaacatatcgccattgcgttttacaagcgttacgttcataccttcttttaaagtaccgcgatgtacacggcctacggcaatacggccggtataggaagaataatccaaagaagtaatcaacatctgcggagtaccttccaactgttgtggagccggaatgttttcaacgatacaatccagcagaggagtgattgtatcggttggcttttgccagtcggtactcatccagttgtttttggcagaaccgtagataacggggaaatccaactggtcttccgtcgcattaagactgaacatcaagtcgaataccatttcgtaaacctcttccggacgacaattaggcttatccaccttattgactacgacaatgggtttcaaacctatttccaatgctttttgcagtacgaaacgggtttgaggcatgggaccttcaaaggcgtctaccaacagaatacagccatcggccatattcaacacacgttctacttcaccaccgaagtcactatgtcccggagtatcaataatattaattttggtaccgttgtagttgatggaaacgtttttagaaagaatcgttataccacgttcacgttccagatcgttgttgtccagtataagttcaccactattttggttgttgcggaacaagtttcccgccaatagcatcttgtcaaccagcgttgttttcccatggtctacatgggcaatgattgcaatgtttcgaatattttgcatataatacctattatttggctgcaaaggtacgaaaataggattagaaatatgtgcaatgatagcaattttttcttgtaaaacgttgtgggatataaagataatacctatctttgcacgctcaaaagaataatttactatattaaaattctaaaagttatgtatttagacgctgctaaaaagcaagaaatcttcggaaagtacggaaagtctaacactgatactggctcatctgaggcgcagatagctttgttttcctaccgtatttcccatctgactgagcacatgaagctcaacagaaaagattatagtacagagagagctttgacaatgttggtaggtaaacgtcgtcgtttgcttgactacctgaaagcaaaagatatcgaaagatatcgtgcaattgttaaagaactcggtttgcgtaagtaatttacttgctgcggaaagattgaaaagccgttccttgttagggggaacggcttttttatttcttcttttgggctgatgagcatattttctcacttataattgtgtccatctaaagaatttgctatttttgcagtttaattattataaattatcacctttgatatctaaaatgctttcaatatggatacaagtaaaattgtcggcgaaaaaattaaagctctgcgagaagataaaacaataaccatagaagaactggcgcaacgttccggtctggccattgagcagattgaacgtatcgagaataatatcgatattccttctcttgcaccgctaattaagattgcgcgcgtgctgggagtgcgtttgggtactttccttgacgaccaagatgaagtcggtccggtggtatgccgtaagaaagaagctaaagatgcgattagtttctctaataatgcgattcattcccgcaagcatatggaatatcattctttgtcgaagtcgaaagcggatcgccacatggagccgtttattatcgacgtaatgtcgactgaggataccgactttgtgctgtcttctcatgagggagaggagtttattatggtgatggaaggtatcatggaaatcagttatggtaaaaatacctatctgctggaagagggagatagcatttattacgattccattgttcctcatcatgtgcatgcctacgaggggcaggccgctaagattctggcagtgatttacactccaatttagcgaaatacggtaattactaatcaattaatcactaactacatgcaattatttgatcgtactttgggccagtggctggaacactgggctgaagagacccctgataaggaatatatcgtatattccgaccgcaatctccgtttcacttggagccagttcaatcaccgtgtggatgatatggcgaaaggacttatttctatcggcgtggaacggggaacccatgtcggcatttgggcggctaatgttccggattggctgacgttgctttatgcttgtgccaaaatcggtgcggtatatgttacggtaaatacgaactataagcaatccgagttagaatatctttgccagaactcggatatgcataccctttgtattgtaaatggcgagaaggatagcgacttcgtacagatgacttataccatgcttccggaattgaagacttgcgaacgcggtcatttgaagagcgagcgttttccgtatatgaagaatgtagtatatgtcggtcaggagaaacatcgcggaatgtataatacggcggagattcttttgttgggagagaatgtggaagatgcccgtttgaatgagctcaaaagcaaggttgactgtcacgatgtggtcaatatgcaatatacgtcaggtactaccggattcccgaaaggagtgatgttgacacattataatattaccaataacggattcctgaccggcgaacacatgaaatttacggcagatgacaagctttgttgttgcgtaccgttattccattgtttcggagttgtgctggctactatgaattgtctgactcatggttgtacgcaagtaatggtggagcgtttcgacccgttggtggtgttggcttctatccacaaggaacgttgtacggctctttatggagtacctactatgtttattgccgaactacatcacccgatgtttgacctctttgatatgtcctgtcttcgtaccggtattatggcgggttcgttgtgtcctgtcgaattgatgaagcaggtagaagaaaaaatgtatatgaaggtgaccagtgtatacggattgacggaagcggctcccggtatgacggctacccgtatagatgattcatttgatgtgcgctgtaatacggtagggcgtgattttgagtttacggaagtgaaggtgattgatccggagacaggtgaggaatgtccagttggtgtacagggtgagatgtgtaatcgtggatataacaccatgaagggatattataagaatccggaagctacggcggaagttattgatgagaataatttccttcattcgggcgacttgggcattaaggatgaagatgggaattatcggattaccgggcgtatcaaggatatgattattcgtggtggagagaacatttatccacgtgaaatcgaagagtttctttataaacttgatggagtgaaagatgtgcaggtagccggtgttccgtcaaagaaatacggagaggctgtcggtgcatttatcattctgaaagaaggtgtgacaatgcaggaagaagatgtgcgtgacttctgcagaaataaaatctctcgttataaaatccccaaatatatcttctttgtggatgaatttccgatgacgggcagtggcaagattcagaaattcagactgaaagatcttggtttgaaactttgcaaggagaaggggatagagattatttaaatgaagaatgaataattttacttttcttaggtataaaaagagactgtcttctaataggcaaaaagaagacagtcttactttaattatatgcttagagctcatttataacttctgaatttcttccggtaataatcctgtcgctttttggattgtctctgtgtccaatcccattgatttcagatttcgggctatttctatacacccttccattttttccttccatgcgtccttctaattttactctatccaacacgtcattttgtatcatgatggcactcaggtgttcgtcataagcatagcgttctgcaggagacatattataataaatcagttttttacgagcttccgtcaaaccgggagcctgggtgtcagaacggatacagccggtttttaggtactcaatccattcctctaaaggagtgactgctactttattgaactcgtttacgcggattaggaagtactctgggaaaatccctgcaggaagtttatggacgagagcgtccttttcttttgttgttacttcaagcgatctccggtgtgtactccagtgaagctattctgtccatgatataaataatcatttccttttccgatgtcgaagtacagaatgctaatggaataaatctttttcacttcgtagtagcgttcgccaagagaaatgtgttctgtgattgctttggcgacaccgtaaaggatacgttccaagtaatacaactcacgcgtattttgaatctctactatgatgatttcgcctttgctgtttttggctttgatatccacggattgaacttgtcatctacgctttgctgattactttcgctttccagcagttctatgattttcacttcttcacccaaaaggactgttaagaatccctcgagtacgtcgaaattcgctttttgacggagaaggcattttacggctcagtcaaaccgtatatatctgtcctgctgctccatatcctatcttttttgattattgcaaagttacgatttttttcagactttattacttttccactcaaaaaacaaaatccttattgctgttatcctatactgcatctgtttacaggtttggatggcttattataatgactgttggctattgaattaagcttcacctttccttcataacgctttattcattggtgttagcgggtgaaggacaggtccttcacttgtctttcagagattattgttgtaaattgctgtttttttcttttgagattattaaaggtattttgtttgtttttggcagtcagctttcgtttttcttggtcaatcccaatctttttattctttgtgttttacttatcacatatatgataattgtatgtcatatatgtgataagtatttatcattattgagataagttgttatcatagatatgatcagggcagacgcattatattttttactatattattcctttttgtttattttctatattgctgattattaatgtattaccatttgtttatgtcgattgtttttcttatctttataagatatattaaaacataaactaacatgaaaattggcataattgacctttgtaaaccaatagaagatcctaggatgaaccgtaaaaaagtacataaaatggaacccattatctatatatccattgctgctgtaatctgtggcgcccaatcctggaatgagattgaggaatttggcaatgcgaaaattacttttttcaaaagtcgcatacctgacctggagtccatccccagtcatgatacttttaatagattcttcagtataataaagcctgagtattttgagttgatctttcgtaattgggtaaaacaagtctgccaggaggtgaaaggcgttgtagctatagatggcaagctcatgcgtggtccaagccaatgtgatggagaacatactacgggaaaagaaggattcaaattatggatggtttccgcctggtctgccgctaatggactttctttaggtcaggtaaaagtagatgataaaagcaatgagattacagctattccattgttaattaactctttggaactaagtggctgtattgttacaattgacgcgatggggtgccagaaagatataccccagaccattattgagcatgatgcaaattatattatagctataaaggagaataagaaaaaaaattatcaactggctaaacaaatcattgacgattatcaggataaagatgaaataatcaatagagtcaccaggcatgtgtcggaaaacaccggacatggaaggattgagacaagaacatgcactgtagtcagttatggatctattatggagaaaatgtttaagaagaaacttgtggggttgaagtctattgtagggataaagtcggagaggacaatagtagcaacaggagaatatactcaagaggtcagatactatgtaacttcacttgataataccaaaccggaggagattgcgtctgccatcaggcagcattggtctattgagaataatcttcattggcaactggatgttacctttcgggaagactacagtaaaaaggtgaaaaatgcagccagaaacttttcggtggcaacaaagatggcgcttaccatactaaagaatgagaaaacaacaaaaggaagcatgaatctgaaaagactaaaagccggatgggatgaaaactatttgtcacaacttttacaggaaaataatttttaatgcgtctgccctgtagatatgataagtaaaaatgtgaagaagtgaatgaaagatctcctcttcacccgctatttcctatggatagagtattgcaatgaaaagatgaaggctgctataattaatgaagaatggtgagtatataacactttcttatcatgacattttgtatacaggattataatgttgacaggataaatgccgttttatactatgttgcaaatatgataaaattcataataatttgtaggtttatagctgtataaatatgaaaatataaaattttcaaagggcttattgaatattttgttgagaaatgctaatggaaatggttctgacgggctggctaattatggttctttattgaatctttttttttaatttggttgcttttcaaaaaaaatgtatttatatttgttgtttctaaaaaaagaataaaaataaattaatagagagggaaagtcggattaaatgttttgttcttgtatttgttttgtcatgagaatgtaattgctaatcttttattttgccactctaatagatgatttaatttgaaacagatgaagaagaaaaaacttttgtggagtgcacttctgctactggttttaggagcgtgtgatacggcggttcagcaggtggcggacaatggaaaacagacggtggtgcagtttacctctgttgtggaaggcgatgctgtcaccagaactacgggaagttcatggactgccaacgatagaattggagtgtttatgaaacaggctggagaaacgttggggggtagtactattgttggtgaaggagataatgttccttttataaccaaacagggtaatggtaattttctgtcagacgggaaagtgatagaatatccgtcagatgaaagtgctgttgattttatagcctattatccgtttcaacctattttggagaattatatatataaggtagatgttactaatcagagcaagcctgaagaaatagacttgctttatgcagataatttgacaaaccgtactgtaacttccgcaacgggtaatttgcagttctatcatcagctttctcaattagtactaaatttgagtagttctgataatacagatttcagcaatctttccgttaccatttccggggtaaagacaaaggcggattttaatcttgtggacggttcattggttgtagatggaaaatcagacgcaacggtcactatgcgtcgtgtaggaaatgctgcagaagctattctattaccggtaaatactgtaaatggcataaaacttactttgacattgaacgggaagacgaaagagattactttaccgacctctatcacttctttaaagcaaggctccaaacacatattctctgttaatataaagaatggcggttcacaagtggacccagaggaacctaagtatgcaaaatggagagagactccggtgataacgaagagtatgttggaaaaaagcaatataaaatatattaatcactatatgccctctgataagaaggtacgtaattattccttgctttatgattcggaacttaaattggcgtattgggtggcgtatccgtattgttcgtattatgacggtagtgcggggcgtaatgaaaagtgggcttacgatccggaaatttcctcctctcttcaagtaaatttgaaaaattcttatggaatctccggatatgatcgtgggcatcagattccgagtggagatcgtcaaagggatgtggcgagcaatcaaacgacgttctattacaccaacatgacaccacaaataggccaggggttgaatcagtctatatgggcaaacctggagggaaaagttcgcagttggagtagcggagccgatacgctattcatcgtgacaggagcggctgttactacgctaacagacaagaatatagaatggaagacgaacaagaatgacggaaagcaggtggctgtgcccaagttctattataaggcgttggcgcgaaaggtgaacggtgtgttccaaactatcggattcaagttagagcaaaaaaagtattctaatgctaatggttatatggactgtgcaatttctgtcagtgaattggaggaagaaacaggatttacattcttcccgactttgagtgctgatatcaaacgacaatgtgacaagtctaaatggaaatagatagtcttcaatatatttttaactaatcactaatgattatgaaactagagaaattattctttgcaaccgtgttgtcaggattggcattcaccgcatgcgtggacaatgatgacaaaagtgaatggaatgatggaagtcagcctattagctttacttcttctattaagggggttaacaccagagctgttgattcgaaatggactgccggtgataagattggtgtttttatgaaagcaaccagtggtgatttagcctctgctattgctgttaataagcaacacgctacagacgcaaatggaaatgtttctgctgtcgatgcggataatgctttgtactatccaacagacggaagttctgtagattttattgcttattatccatatacagcttcgttgacgggtaatgtatataaagttaatgtcgcagaccaaagcaagccggagaatatcgacttgctctattctaacaatgcaacaggatttgcaaaaggaactgcaaacaaaccgcagttgcaatttgcgcatcagttgagccagattgtattcaatatcactaaagacgctactgtaccttcgttgaatggactgactgtaacctttgaggggatgaatacaactgccgattttgctttggctaatggcacattgagcaatgtaggagctgctgctaaaattgctgctgttgtagatgaaactgccgctactgctaaaaccattgttttgccgactgctgcattggctgatgtaaaagtggtgttcaacttgaatggtaagacatttaccgctgattatccacaaaaagaattgcttacaggtcgtaaatatactcataatgtaaaattaagcgatagtaacggacagccggtaattgtgatggatgctgctaccattgaagattggattacagtaccgggtggtgatattgatgtggattttggtgatgggacagatgtaccggagccgccggtaggtgatgtagtgaaaattacagattctgaagcttatgtggaagcttttactactggacaaggtaaatttactattaataatgtgaatcttcctgccgaattgtctagggaggtttgggtacaagataatagatatggaatgaaagcttctgcttttaacggttcttcttcttgtgcttctgaaagttggttagtatctccaatgcttgatcttacaagtgtgacacaagctaaattggcttttaaacatgccataaatcagactaaagatactaatttcaaaagttattattctctttgggctaaagaaaaagaagctacagattggacagaattgactatgaattttccggaatcagaaagctggaattatgttgatggaggagatgttgatttgagtgcatatgcaggaaagttggtgcaaattgcatttaaatatacaagtacagcaagtaacgcaggaacttgggagattaaagacttgaaagtttatgcgggagaaaacagtggggaagtagatccgacaccttctactgaattgataaatttgagctttgaaacttggacggcctctgctcctgaaggttggggaagagataaggtaacttctgttacatattcaaaaagtagtgatgcgcagcaaggtagtaatgcggttttgatggttggctctactaagaatgcccgttttggttcttccgatattacgttggcagcaggtacatattctctttccgtttatgccaagagtgtggcaggtacagcgaagtttaaaatggggtatgctattattgatatgatagatactgacgcgatgaatgcttataaatatactcaaactgacgcggaaatattatcaacagagtggagacagataacgcatgaatttacggttgaaaacgaaacagtagcttccatcttctttgtaaattcaaaaagtggcgttggagcagatttgcttatagataatgtctctttgactaaaaagtgagtatagcttttattgattgacagaatggagactgtgttgaggtatctctaacacagtctcgtttttacaacgaataactgataattatgaaacaaaatttagtgcttttactagcattcctttttccttcctttctcttggctcagcaatcgggtacggggataaaaggttgtgtgattggtgcggaaagtaatcgtcctgttcctggagtgattgtcactttgaacggagagggtcgacagacgcgaaccgatgtaaaaggagctttctttttcgacaaagtatctccgggaaaggatgtacttgtttttaactccgtaggcatcaaccccaaaaatatattggtggaggtgactgaaggtatggtaacagatcttggtgaagttaaggttgtggaactgactgttactgataatctttcattaattggtgtgctggatgaagcagcagtggatgacgacgtagagagtagttcacaagagattagttcgaaagtcatactttctaacgatgtttatttgaataaaacttcttatcagttatctcccatgcgttttcgtgtcagaggatatgaaaacatctatgaacaaagatatataaatggcgtgaatttcaatgaccagttgaggggcgttttcaactattcttctatcggtgcattgaacgacatgacccggaatggagatgtggtcaattacaacagaccttccgctttcacctacggatctatcggcggtgcggagaatatcaatatgcgggcttcttccatttctccgggaacgaaggctacactctcttacgccaaccgcaattactatttgcgcggaatggtgacttattccacaggattgcttgacaatggatgggcttttgccgcatcgttaggcggtcgttactcgcacgaaggtgcagtagacggtactttctatcgtaatttctcttatgcgctgtcggccgaaaagcaatggaaagggggagaacacagtctctctatcgtcactttcggttctcctgtgcagcgtggacagcagagcgccacttatcagcaggcgtgtgaattgctggacaattatcaatacaacccgaactggggatatcagaacgggaaaaaaagaaatgcgaaagtcgttctggctttcgaccctacattgattctttcacatacgtggaagattgacgacgaatcgtcattggttacaggagtgggaatgcattacggacgctatggcaatacagcattgaactggtacaatgcgtcggatccgcgtccggactattatcgtaagttgccatttgccattgacatcaatgtctcacccgaagttgccgaagctacagaattattgtggagacgcaacgatacgagcgttacgcaaattaattgggacaatatgtatcttgccaacgctatgcaggcggatggaaaagcgcaatatatggtggaagaacgacgtagtgatttgctggaaactactttgaactctacttttaacaccaaattgggcgaccatagctggttgacggcaggggcggaattccgatacacacagtcgcggcagttcaaaacagtggatgacctgctgggcgcatcctacgtgatggattatgacaagtatgccgaacgtgatatacacgatgacctcaacagcaaacagaatgatttgaaccgtcccgaccgtaaggtatatgaaggcggtgtgttcggatataacttcaatctgaatatcatgaaagccggtgcatgggtcaccaatcagcatagatatgctaagatagacttctattatggagcaaagttcgattatgttcagttctatcgggacggtaaaatgaagaatggacgttatccggagaattcttacggaaaagggcggacacattcgtttgtggatatggcattgaaagcaggattgacttataaattcaatggccgtcatttcctgacagccaatgtcagttacggtactgaagctccgttgcctaacaacgcttatctgtcaccccgtatttcggatatgactcctgaggatgtagagaacggacagaagctggagagtggaagagtattctctgccgatgtgaattatattttttcattgccctccttcacgggacgtgtttcgctttatcagactaatttctacgatcagatggagcgtagcagttacttcaacggaaccaacttctttaatcatgtgctctatggtgtgaaccgaatacatcgtggtattgaattgggaacgacttataagttggacaaccattggagtttcgaccttgccggtaccatctcggaatattattatagcaataatccgatggcagtggaaaattatgaagctacacaaggtgacaagacttcaaaagtatatatgaaaaatttgtatgtgtccggaacaccgcagtttgcgggaactttcggggtacgttacttcattgattattggttcttgggtgccaacctgaatgctttcggacgcaattatatcgacgtggctcctgcccgccgcatggaggggatttacaatacggtagacccgacgcttccggaaacgatggatacctattatgccatgactacacaagaacgtatcggaagtgcttgtacgctcgacctttcggtaggtaagattttctacctgcgcaaccgtcaatccattaatttcaacctttcggtcaataatgtgctcaataagcgggacattcgtacaggtggttatgaacaggcacgtgtgtttgcttcagacggagcgttggttaatccggcgttgttccctaacaagtattattatatgcagggtatcaactgctttgcgaacatcagttaccgcttctaaacagagaacggaacgaatattataacgattaaaattgaaacagatatgaaagtaactcagaaaatattctcctttttagtgctggctgccgctgtgttgaccggctgtgaacgtgattatgatgctcctccgttgaatgaacctgtatatgaaggacccagtgcgaatataacgattgcggatttgaaagaaaactgtaagaatgctacgcaggaaacgcctgtagtaatcaccaatgattgggtattgaaagcatacgtcacaggaaacgatgaatcgggcaatatctacaagcaggtaatcgtgcaggatgaaaccggagcaatgccgatacaggtggacgagaataacgtttctaatttctaccgtcgcgggcaagaggtttttgtgaatctgaaaggtatgtgtgtgtctgtatatggggatgaacagcagttgggatggcctgacgggggcacgacctatcgtctgccgtttactgaatttcaggcgcgtgtccaaaagaacggatggccgtatgtggacaacgtgaagccggaagtgattacagacatgagtacggtaaaccttaacgtaactaaaatgacttaccgtttggtgcaaatggaaggagtacatttcgaaaatggcggaaagaatacatttgccaaagtggagacgaaagagtacggagaggaaaacctgaaagatgcgcatggaaatgtgattatggtgagaacgagcagttatgcttcctttgccgcagaaacgttgccggtaggaacgggaactgtagtaggtattctcggacgtttcaaaggaacttggcagctgatgattccttcccgttcggatgttttcggcttcgatggagttgaaccgggagaaggagatgatggaaatgaaggcggtgaaacggtattgtttagcgaaacgtttaaagcgcctgataagattagcgtagacggtaaggatagatgggcatcatcaataactgaatggtgggatgctagtccttccaatacattcgataatccttcttccatgtttagtggtgatcttgatcttttgtcgcctcgtacgcaaagcggtgacggtaatatatggttttatggaggtgattattcactctctattgaaaatatagatctgaaaggtgctgctaaagtatcattgatttacaagatgggagttaatgtatatcagcctgaagataaacagaatatcaatacattgagtgtgaaatgcaacaatacggatttgcctgttcctgataaagaactgactggtaccaaaaatccgtatgtggtcgaagagatacgtatagacgatattgctgtatcaggaactgctacattgacattcagttgtgtcggtgctaccaatgtaaaaggtatacgtctgtatgatgtgaagctaatcgctcccggctctggtgaaggagacggtgaggttataaagccggaaccgaccaaataatcgtaatagataatgagaagacttgtattattgaatatgctactgtttgccctgtccgtcggactgatggggcaaacacgtttgggagtctatgcggcaggtttctataatctggagaatctgttcgatacggaagacgaccccaataatccgggcgatgatgagtttctgccgaatggtccttacgcttggacgccggagaaatatcagcagaaattgaagaatatggcgaaagtcatagctaagttagcccgtgagaaatgtccgggtggaccggctattcttggtgtttccgaaatagagaatcgtcgggtgttggaagatttggtaaagacggaaccattagcttctatgggatatgaaattgtgcattacgattcaccggaccgtcgtggaattgatgtgggatgtctttataaccccaaattgtttactttgctttcatcgaaagtatatccttttgtgatgccttcacaaccgaatttccgttcacgtgatcagttgctggtgagcgggctattggcgggtgaatcgtttcatatgattgttaaccattggccttcccgttatggtggtgatcgttcttcaatctatagagaagctgctgctgctataactaaacacattgcagactctattcatgctgctgatccgaatgcgaaagtgttgattgtaggggacttgaatgatgatccgaataataaaagcacgaaggaagttttaaaagcttgtagaaaggccgcagatacgaagcctgacggttattttaatgctacgtggcctttgttcgaccgtggtatcggttctttgtgttatcaggataaatggaatttgtttgaccagctgattatttcaggtaatcttttaggtaaagaccgttcaactttgaagttttggaaagcggaaatatttaatcgtgatttcttgacgacacaggagggaaaacgtaaaggatatccgtggcgcacattctccagtaatacttttattaacggatatagtgatcatttccccgtattgatttattttttgaaagagatacgttaattttattgtcgtatattgcaatataaatgcattgatttgaataacttgatgttatttcgaatctgtgcatttattttttatctactgtttgcggtctgtctgtaaatacctatatttgcctgtgattcactttaataaagacaggcatggataatactttcagaatatatccgataggaatacaaaactttgaacagttacgcaataataataacgtttatgtagataagacggaattaaagatgcaagatgctatttatgtttttgaattcaaggtggacggtactccggaagaggctttaaaacaaataaacagtaaagggtatgctatcccatatcaatcggatcacaggaaagtgatgaaggtaggagttaattttgatagtgcaacaaggacaatcggagaatggagagctatggaagattaataaaaaactaaataattctagtcatgaaacacagactattgctactattactattcatgttcgttacatctgcggtgggatgggcacagaaatccgctcctctttcttttactgttaaagggatactattagattccttaactcaggaaggagaaccgtatgcaacaatcaggattacaaagaagagtgccccgaataaggccgtgaaaatggcggtgaccggagctaacggacactttcaggaaaaactgaatgtggcttcgggggagtatgttattacgatttcctctattggcaaatctcctatcgtgaaagaatttgctttaaaaccatcggtgagagtggttgacttggggactttatactcttcggaggctaacaatgtgctgaaaggtgtggaaatcgtcgcacaaaagcctttggttaaagtggatgtggataagattgaatacaacattgaagatgatccggattcaaaatcgaacagtatattggaaatgcttcggaaagttcctctggtaacggtggacggagaggataatgtgcaggtaaacggtagcagcagtttcaagatacacgtgaatgggaaacctaacaatatgatgagcaacaatccgaaagaggtgttgaaaagtatgccggcaaatacaatcaagtatattgaggtcattacttcaccgggcgctaaatatgatgcggaggggattggaggtattctgaatattgttacggtgggtagcggatttgaaggatatacggctacttttagaggaaatgccaataataacggggtgggtgcgggtagctatgccatgataaaacaaggaaaactgaccctttccgccaattacaactataattataacaacagcccacgtagctattccgacagttatcgggagaattatgagtcggtcgatgagaagtatctggaatcggaaagcagttccaagtcgaaaggaaattttcaatatggtaatctggaggccagttacgagatcgacacgttacgattgctgactatggcttttggaatgtatggcggcggtagcaagaacaatagcgacggaagtaccatcatgtatggatccgaccatcagagttttgcctatcggtataatacggataatcatggaaaaggctcttggtactccattaatggtaatgtagattaccaacgtacctcgaagaagaacaaggagcgaatgattaccttctcttataaaataaactcacagcctcaaacaaatgattcatataatacctacttgaatattgaaccggaagcagacaggcaggatatcatagataatctgttgttgaagaacttccattcggatggtaaaacgaatacgatggaacagactttccaggtggacttcacgactccgattggaaaattgcacacgattgaaacgggtgccaagtatattttccgtcgtaattccagtgataacaagttttatgaggccgaaggaggaagtggggattatgtatatactgatgaccgtagtagcgagtatcggcatctgaaccatattatttcggcttatgccggatatacactgaaatataaggggcttacattcaaaccgggatttcgctatgaacaaactgtgcagcgggtaaagtatattgtaggtccgggagaggatttcaatgcgaatttcagcgatctggtaccttccgtttcgttaggtatcaagcttggaaagacgcagaatttgcgtggtggatataatatgcgcatctggcgtccaggaatctggaatttgaatccttatttcgataatcagaatccgatgtttatcagccaggggaatccgaatctgaagagtgagaaaagtcattcgttcgatttgtcttatagcaatttcacggcgaaattcaatgtcaacctttcgttgcgccattctttcaataataatggtatcgaaagggtcagccatttggttaccgatccgaatggagaaatctttgatggagaccataaagctcctcaaggtgctctgtacagtacttatgataatatcgggaagagtagggaaaccggtttgagcttttatgtgaactggaatgcttctcccaaaacgcggatctatattaacgggcgtggaaattacagggatttgcgaagtccttcacagaatttgcataattatgggtggaacggttccgtttatggcggaatacagcatacgttaccttggaaaatacgcttgagcctgaatggcggaggaagcacaccttatattagcttgcaaggaaaaggctcgggctacaattactatggcctggggttgagtcgttctttcctgaaagaagagcgcctgtcactgaatatctattgtaacaattttgtggagaaatacagaacgtacaacagtcatactgaagggcagaactttatgtcgagaagttcgaacaaatatccgaaccggtattatggatttagtatcagttaccggttcggggagctgaaggcgagtgtgaagaaagcagcccgaagcattaacaataacgatgtcaaaggcggaggaggcggaaacaccggtggtggaggtggtcagtagaccacttccgcacaccgagattccctcttatttctgtctcacgtcttgcttgttggtgttaaaaccaagtttggttaatccggcctgtacgtcgggatggctcatgaagagtttccataataatccggtccggtagttttcgatcatgacagcaataggaccctggtcgatagccagataacgttgcggataccaattgtccgtttcgctgaaagcatcgtagaatccgaaaggaccgaacactttatctctcatactatatagatggcgcatcacttgcatggaatattccggtgtatagacaatggatgaaagcgcggcggtaggggagattactcctttgtcctcctgctcattgggcgaatgagccgcatatccatcgacggagtagctggcagtcagtccccaacaatccggtccgaaacctttgtaatgtttagggttgcggatgcagtaagcacggttcaccagtgtcaggttgcgcatttcgtggaagtagctggggcagtattcatctttcagtcccaccggatcaagtccgagaaaagagtattgagcccagaaaagcggtccggcttcggtgccctgatagcggaggtgcaactcgattccttccactttatgcggagaaacgatggctccgttctgtgcccaaccgtcatgatagacagccgcaggtactccgtgtgtaggagaagcggcggcaagaatatacataatcatacattcgttgtaaccgtgtacagggaaattcatttcccagccatacgtcggactccaatgccagtaaagaacgttttgcccgccttgccgataccagttccagtcgacatcccgccaaatctggtcgatccgttgggcgagggctttctctttctcgtttccgttgacgtaatattggtgtacggccaatagcccttggatgaggaaagctgtctctaccagatcgccaccattgtctttctgcccgaatggtttcaccttgcccgtatcaccataccaccaatgagggtaggctccgtggaaacggtctgccttttcgaggaaagaaacgatgcgttccattcgtgccagtccctcttcgcgggtgacgtaaccgcggtcgattcccgcaaggatagccatgatgccgaaaccgctgccgccggaagtgactacgttggcatcgttttctggataaacgccgtccacatgataacgttcgggagctaagccgctattcggctcggcaccttcccagaaatagaggaaagtccgtcgctggacggtatccatcagggcgtcgtccgataacgagtcggtggctgcggaaaggttgttgcttttgcttttccctttacagctctggaaagtcagggcaacggcggatagaaatagtaacatgagcggaagtgcactcatttctattattcttttatatttatcgttcataatcaaggtgataaaagtttagtttaacgtgaacttcgcggttttcacatcacggctgttcgtaccgatcatcacttcaaagtcgcccggttcggcaaccagttgcaagtcataattatagtatcgaagcatttccggagcaatcttgaaacggacaatcttcatttctcccggttccaggaatatcttttggaaacctttcagctctttgacgggacgggtactgctacccacaacgtcgcggatataaagctgtaccacttccgagccgggccatgttccggtattggtaacctccactgccgcggtcaacgaaccgttcatgtccatggaagaatgactcaagtcgatgtcgctgtaagagaacgtcgtataagaaaggccgtaaccgaacggataaagcggatcattatccacatcgagatagttgctgcggaatttctcgaaccatttgccatctttcaatgggcgtccggtatttttgtgcgcataataaagaggtatctggccgacattcttcgggaaagtcatagtcagtttaccacccgggttgacgtaaccgaagagggcgtcaccaatggcataagcggcttcactacctccgaaccatacattcagaatggcaggcacatgctcctgttcccaattcagcgtaagcggacgtccggtgaataacaccagtaccaccggtttgcctgtctttaaaagttctttcaacagattctgttgtacgtcgggaatattcaagtctgtacgactgctgctttcaccgctcatttcagaagattcgcctagcgctgcgatgatgatatccgaccgacgggctacgttcaatgcttcgtccaacaactgctggtcggtgcggttgtcacggttcagggaacggccgaacatcgttgcccgttcttcgtaacttgcatcactaatcaggttgcttcctttagcgtacatgatattcgcttttccggctgtcatctctttcaatccttctaccaaagaagggcaacggtcgagcacagctgctacgctccatgtacccggcatattgctacggctgtttgccaacggaccgattactgcaatatttccttttgggttgaaaggcaacaacggatttccgttcggattaccgtcgggactgtcattcttcagaagaacgaaactttctgctgcaattctgcgggctgcatcacgatgcgctttggtaaagatgtcgcgtgccggacgtttcggatcgcaatatttataaggattatcaaacaatcccagtttatatttggcttccagaatacgacggcaagccgtattcaatgtttccatagagacttttccttcctgaacggatttcttcagtgtccctacaaaaccctcgcttaccatatccatatccactccggcgttgatggcacgggcggatactgtctgaagatcaccgataccgtgatcgatcatttctgaaatgcccgtataatcagttaccacaaaaccgttgaatccccactgtccgcggagaatatccgtcatcagccatttattggcagtggccggaataccgtctacttcattaaaagaagccatcacgctacctacacccgcttcaacggctgcttcatacggcagcatataatcattgaacattcgttggcggctcatatccacggtgttatagtcgcggccggcttcgcctgccccatataacgcaaagtgttttacgcaggccatgatttcgtcattccgttccatgtttttcccctgatagccgcgtaccatcgcttcggcaatcatggcaccgagaaacgggtcttcgccactaccttcggatacgcgtccccaacgagggtcgcgtgaaatatccaccatcgggctgaaagtccatgagattccatcagcacttgcctctacggctgcaatgcgggcagactcttcaatggctgtcatgtcccaggtgcaagacaaaccgagcgggatagggaacatcgtttcgtatccgtgaataacgtccatcccgaacaataacggaatacccagccgggaatcttccacagcttgtttctgtacttcacgtattttctctactcctttcagattgaacaatcctcccacttcgcctttcttgatttttgcggcaatgtcgctgcttttagcttgaccggtggtaatctctccggtgacgggaagattcaactgtccaattttttcttccaaagtcattttgttcatcagtacgtcgatgaagcgatccatatcctgtggagacttttgtgccgatacagtcagaagacctgtggcaaacaataggatgagtaaacttaactttttgtatatcatgttattatatttatttatagataatccggattttgtaccaatactccttttgacttatcaatttccgtctgcggaagtggaagcaaggcgttcttatcctggtaatttaattttcctgccgcgtgcaacacatctttggcaatcccccaacggacaaggtcatagaaacggtcgaattccattcccagttccacacggcgttcgtgacggatggcctcgcgcaactctccttgatcggtagttgtcactttgggcagtatattggcattagaacctctggcacgtgcacgaacttgctccaggtagtcgatagcttctcccggaattcctttttcgttggctgattcggctcccatcaataatacatctgcgtagcggatcagacgaatgtttacccagaatcctttgttggtatattctttacgcaaagccgggtcggtataggctttcttattgaagtaagcacccattgccggggaaaccggagattcaccgtatggctcgttggtattttccggagtgataggatcgctgtccgagtggcggaaataaagcagagtggcattcttacgcggatcgcccggttcgtatgcctccgccatatgttcggttgccatgttccatccccagcctaaatcccactgatcggctccacgaacaccttgtacttcgcagaactggctaccgataatatcgctttgcggtagggccgcagtagcggtacattgcagttcgaatatggagccgctgttattttcaccttcgtctgtgaatatcttattgtacggggtgttcaggttataaaggcctttcttgattacgtcggtggaggcggtgtacatattgtcccaatcgttacgcatcatataggtacgcgcgtgtaaagaacgtgcagctccccaagtcagccgtcctgtataatcggaactccatgtttcaggcaatgactcttccgctgttttcaggtcgcggtctatttgctcgtatatcttatcagcggtcgttttcggaatattggcctccgaagcgtcgttgattttataagtcaccaaaggcacttcaccgaaggctcttactagattgaagtaacaataagcacggaagaaggaggcttctcctttattgatgatgtcttcgctttccgtctgtcccgttgtttccttttcggcgatagcgttgagaatgtcattacattgatagatgatggcgtaatttttgccccaataagcacctagctgaccattggaaggagtgtagatgaagtcgtcgtacatttcggccacatcggaaccgtcgctggcaagacttcctttctccgcatcttcggagcggaaactgtggatggcgaaggcgggtgtaccggaggttacgtcgaagctacgcatcatggtgtatacattatagatcttaccgttcactagtgcgttcggattgtcatcttctgtgaactgtccttgcggactacggtccagaaagtcgctgcaactgctcagaagcagtgtggtagcggcaataaaggttgaaaatatatatttatccagtttcatacaattatcgttttaaaaggttaagttgattccgaaggtgtagactgccggtacgggataactgccgttgtccactccgaatgcggtggcggtaccacccagctcgggagtatagccggtgttatgtttccatgtcttcaggttctgaatgttgacatagactttcagggcttgcagacgtatctttgcgagcaggctcttgtcgaaagagtatgccaactgtacgttacggatacggaagaacttgccgtcttcgatgtagtattcagaattcaacgtattgatggaatgtttggagttcaataacggttggctgttggatgttccttctccgtgccagcggtccatgcgttgtgccagatagttaaactgggcaaagttatagttgtcccatgtacggaagatctggtttccgccttgtcccatcatatcgataccaaaagaccagttcttgtaatccacgccgagcgagaaaccgtaagtgacattcggtgtcggatcacctatcatggtacggtctgcgggagtgatctttccgtcgttattgacgtcggcgaatttcaagtcaccgggagtaactgtagcaagtgtattttcaggagacgatttgatatcggcttccgattgatagactcccgctaccttatagccatagaagtatccgataggataacctgccattgtgtaactttgctgtttatctccggcaatgatggaataaccgtcctgaacaaggctttttactttattcttgattgtagtaaggttggcgctgacggaatatccccattcaccgatctggtcgcgccaggtgattgccatttccacacctttattctgaatccgtcccaagttaccgataccgggcattgttccggagattccgggaacttcagcaagcaaatctttagtgttcttcatataatatacaccttcgaaatgcaagcggttgcgaagcatattcgtttcaaatccggcttcccatgcctctactttttcccagcggagggtaggattaggcaaataggcaagttgatatcccggataaatgatggacggcttaccgaatacggccgaataggcattggtcaatagcggttcagcaggataggccttgtccagattctgatttcccaatgttccgtaagaggccttaatcttcaacatatccagccacttgatgtccttcatgaattcttcttcggtcatcagccaaccgccacctagcgagaagaaattctgccactcattgcctgtataagagaatgcggaagaaccgtctcgacggaatgacccgttgaacagatatttccctttatagttgtagatgatccgtgcaagcatagacacggtactgcgttcccattgggtacttccattggttgccgtagcggcatctccgatactgacgaaccatttatccggatcgtccggaatcacaaggcctactccttgtttgcgcgctccgtccaggcggcttagtgagttataataagtggtaaagccggcagtggctgtcaggttatgattgccgttgtcgaaactgttggtataggtcagcacatagtcactctgtactttcgtctcgttttccttgaactggctgacttctgttttacctgttcccaaagtggaaacatctcctttgacggtagagtcgtatacttttatgataggagtataggtacgtccgttgttggaagcgtagtccatagagaacgtcgctttgaaggtaaaatgtttcaggaagtccacttcgccatagacattacccgatgcgcgatagttttcggctttcgttgtgttcgcttttaaatcgacatctaccatagggttgttgatctgtgctttctgaaaattgggcaaagcgctgtataatccatactcgtcgttatataccggagcgataggagtggagcggagagcacctaacacctgtttcgagtcggcaggtagaaggcgtgcgccgttgaattggaaacctactttcaggaagtcggtgattttataatcattgctggcattgatggtcaccttgctgaatttctcatgttcgatgttgccttgttcgtaagagtagccgacacccagatagaaactatgtttgggagaagctcctgtgatactgatattattgttcgtgataaaggcagtctggaagatttcatcctgccaatcggtgttggcgtcccagccggtgtaatcgaacgggtcatctttctggttggcaagctgttcgctatacagctctttgaattgcgggccattgactaattttactttgtccaccactttcttgaagccgaaagaagtatttatattgaccaaggtctgtccttcttttgctttcttggtggtgatgatgataacaccgtttgcaccacgaacaccaaagatggctagggacgacgggtctttcagaatctccatcgactcgatatcttccggattaaggaagttgatattatcattgaataaaccgtcgacaatgtacagcggtttatatccattgatggagtttgtaccacggatacggatttccggatcggctccggctcgtcctgagtttacaatttgcacacctgccacttttccctgtaaggaagaaagtgggttcatagccggtttattggctatttcttctcctttgacgttggtgatggaacctgtcagatctcttttctttgcactaccgtatccgataacgactgtttcggctagtacttgcgagtcttcttttagggtgacgttaattatgctttgtgttcctactttgatactctgtgtagtcattcccacgtatgaaaacaccaatacatcctccggagtgacggagattgaatatttaccgtccatatccgtaatggttccggtagaagtcccttgtacgagtaccgatgcaccgatcaacggctcattggcggcatctgttaccgttcctgtcaccgtctttgtttgtgcaaaggcagagatagaacctagtaacaggcaagtgagcataatgaagccctttagcctgatggcttttgtctgaagatgttgtgaaagtctagtcctcattgcattaaatttttccatttgttactatttaggttgaagtatctattctgtcgcctgtcggcgaaagtaacaaaggaaacaaaccaaactcaaaaaagattatgaaaaagggaagaatactggcttttaacataactcattccttttttttgtttagatttgatttttttcaagaatgaggttgggtaaaacgaaagtcttagtgtctttataataacaagcgaaagaatggaagaacaagaagtaaatagaatgcgtgatatggccttgcgatattttgaagggcacttggttttggaagaggaaaaaatattattcaactttctacaggggagtgatgtgaatgtccagcttttcagaaattgggaagatgaatggtttgctgtttcacaaaaagatttatatatagaaaacaaatggaatcgtctttcggggagattgcaaataaatcaatggcaaatggtacaaaagaagactaaacggtatacatttactaaaaagctacttccgtatgctgcgatttttattctgggtgtcatgagttcggtcattgtttactttggatttaaagtgtcggataagtcgtctgaccgcttggcacaatcggaatattttgttccgcttggctcacaatctaaaatcttgctgcctgacggttcggaagtttggttgaatgccggctcaaagttgaaatatgacaagtctttcggggatgaatcccgaacagtatatatagaaggtgaagccgtgtttgatgttactcgaaataagaaagttccttttgttgttaagaatgaacggatggaggtaactgttcacggaacaatattcaatgtgaaatcttttacagaagatagtatttcgtcgattgaattgatgcgcggagctgtttctgtaaattattcattctcgtcgcagaaaattgctttgacccctggtgaacgtttgattataaactcaaaaacgcgaaaggtacgaaaggaggagtttgatgttgcttctcatttgtcttggcatgaggggatactcgctttttgtgacgagcctctttctgaaattgcgaagaaattggaacgtcgattcggagtcgacattataataaaatcggaaactttaaaatcgcgaaaatactacttgacttttgtcaacaatgagacgatagatcagatactagacaaaatgaaagaagatgaaaatattcatataagaaagaaaaacaatcagatagaaatttattgatctgaaaatcccgggaaaaggatcataaattacaaatcaaagttaatttaatatttaatattttatgagaaaattactatgtctattagtactgtttcatctgttggttgtggctgtagctcagaataatacaggactgacactgaagatggtggataaacctatttcgctagtactaaatgaaataacgaaaaaagcgggatactcgtttattattccaaccgataagttggatatgaagaaaaaaataagcattaatgtgaagaatcaaccgattcaaaacgttttggatgtggtatttaagggaatggatgtgacgtatcgcattgaaggcaaaaatgtgtatgttgctaaatccgtgaaaaagaagtctgccctttccgaaagaaacgtacaagttagcggaatagtggtagatgaaaacggtgagccttttattggtgctgtcgttgtagataagctaactaacgcgggaacagtgacggatatgaatggtaattttactatttcggttcctgaagggaatgttctaaatgtttcttatataggatatactactactgtattgaaggcttcagataagaaaaatctaatggtgaaactttacgaggacacaaaaaagttggatgaagtggttgtagtaggatacggtgtacagaaaaaaagtgacttgactggagctattacttctgtgaaggcggacgatttgaactccacaccgactactacaatggcagaaatgttgaggggtaaggcgaccggtatccaagttaatatggttagttcaaaaccagggggtagctctaatatttttattcgcggacggcgttcactgtctggaggaaactctccactctatgtagtagacggtgtaccgatggaatcaatcgatgatattaactcgaatgatatttcttcgctggaagtgttgaaagatgcatctgcacaatctgtttatggtgcacgagctgctaatggagttattttgattaccactaaacgaggtgtggaaggaaaaccgaaagttgattataacttttacataggtaagcagaatattcaccggaattttgacttctacaatggggaagaatgggccgattttcgtcgtgaggcatggaaaaatgcaaataacggagagtgtgttgaagaaagctgcttcagtgaaacgatgcgtgacgttatgaattccggtgaatgggtcgattgggagaaattaatgattaagccggcattacagcaaaagcatgacgtgactgtgcgtagtggtaatgataaaacgaagcttgctttttcattgggttattatagtcaggacggtatggtgataaattcgggatacaatcggatcacggggcgtttgaatatcgatcacaaaatacttaaaactttgaatttgggcgctaatttgtattatgcacatgctaaaactgaaaacgcggatggttcctttaatcgcttcattacgatgcctcctttggctaaagtctataatgaagatggatcgctccgtatggatgtgacggatgcaggtgaaagtcattataatccactttggaatatgagtcgttcggtgaacgatgaagtgagtgataattatttgaccaatttgtacttggattgggaaattgtcaaaggattgacttatcgtgccaatggtagtatgagttaccgcaataatcaaaaagacagttatctataccgtgaccatactactggaaaagacacaaatggaaaagcaactataaaaaatgtattgagaacggaatacttgtttgagaatatattaaactataataaagagtttaataagattcaccgtttaggtatcacattgatgcagagtgtgaatgccataaagactaccacaaatgagcaatctgcaatgggattctcgaatgatgaaaaaacgtacaatgctttttcatcggctatggaatatggaattcccgtacatggtatttccgaacgaaaactactgtcttatttaggacgtgtgaactacacattaatggatcgttatattttttctgcctctttacgtgtggatggttcatctgtatttgggaaagataataaatatggttatttcccttcattagctgcttcgtggagattgaatgaagaaagttttatgaaaaagatagattggatatctaacttgaaacttcgtgcttcttggggacaagttggaaaccaggcagttgatccttattctacgttaggagttacggaaagatatatcaatgaatttggcggagagaataacgtgcagattggttttttaccaggagataaattatggaatcctaaattgaagtgggagacaactacttctactaatatcggaatggatttcggatttttcaaagaacgtatcagtggtacgctggaagtctacaagacgaaaactacggatttacttgtcacacgtaaaatcagccagaatctgggatatgccacccagcttgagaatatgggcgaggtggaaaataagggtgtggaactactcttgaccggatatccgatacgtaataataaagtgacttgggctttgaattattctatttctgctaaccgtaacaaaatactcaaaataacaggagaaacggatgaagaggggaaaccaaaagatgacattaattcgaagtggtttattggtaaaccgatgaacgtgtattacgattatcagtttgatggaatatggcaaacaggtgatgatatcgcaaactctaccatgccaaacgctcaaccgggtatgattcgtgtagcagatgtagacggaaacggaagtattgatgatgatgaccgtattgtgatagaacgtgatccaaaatggatttcttcttttggaacgtcattgaatatttatggtgtggacttggcacttgatttttatgtatctcatggaggggtggtctataactcttacctgacgaattgggaacagggaggtgacttgtctggtaaacgaaacggaatcaagcgtgattattggacacccgagaatccgtcgaatacgacaccggctcccaactatacacaggttcctgcctatattacttcattgggatatcaggatgccagctacattcgtttgagaaatttgacgataggatatacattacccttggaaattagccgaaaactgtttgttcagaaactccgtgtttattttaccgccaataacttatggacgaaaacgaaagttcaaagttatagtccggaaacaaataccggtgcttatcccgaaccgaggacattacttttcggattaaatctatcattctaagaacctataaattgtaatgaacaaaatgaaaaccactatatcaaaaattctattagcaggtacttttcttataagtttcacagcctgtaattttttggatgaggagagtgagactcgatatacggctcaatacgtatttgaaactgaagaaggactggaattggctacaaatgctttgtatacattggatcgtaactatcagaatgataaagcgggagaagcagccgctacattggctttacgtcgtgccactgatttgagtgtgaccaaagggggaaccggtaatttttacggcacttatgatccgaatcatctgaaaccctctgctgcagcgccggcatatatgtggaaaggtatgtataatatgattgggaagtgtaacgatattattgaagcgggtaagaaactacctgagacggataaattgaataacctgatagcacaagctaaagcttttcgggcacaatcttactttttactttatcgtacgttcgatcgtatctggctgaatacatcctctacgactcctgaaaatgtaaatgataaacgtgtatacagacctgcgacaaaagaagaggtgtttgaactattgtattctgatttgaagtttgctatcaagtatttagagtggaaaccgaaagatatcggacgctttaaccaggcagctgcccgtcacattatggcggatgtgtctctttggaatgaagactgggataatgtgctgacgcagattgatgctattgaaaagtcgggagcgggttatgagttgttggataatctggataatatattcaaaggagagaacttgaatcatagcgaggctttgctagtgcagcaatggagccgtaatcccggtggaaatttggatactaaagtacctcaaggacattttcaggctgtatggtttatagctaattatcgcgcaacgttaggaggtgatcagtattgctcgactgaaaattggttgtatggagctggacgctgtttcccgagcccttatttgttttcactttataaagataaggtcgctgataagcgctatacagcgttttatattcaccagtataaaaatagttcgaacaaaacagtgcatggtgcaaaaccgggtgaatatttgcctttgttgtggtcatcttcgggttcggaaaacccaccggtagatccgaatgtatatccgggatgtatcaagtatgcggatatttggacgcgttccggttcagaacagttctcgtataaagatattatcgtatatcgtctggcggaaacttatattatggcggctgaggctgctctacgaaaaggggataatatattggctaagaaatatttcaataaaacatggatgcgtgctggaaatacagaatttacgggtacgttgactatgcaggatattattgacgaacaggctcgtgaattggcattggaggggcagcgttggtatttcttaaaacggcacggtattttgatatctcaagtgcaaaagtatgctggtgactcaagagcaggaattagtgcgtctatcgcaggaagaaaaaatctcccggcaaatccgcatttcgtaagatggccgataccagagaatgaagttatcagcatgggacctgagaattttcctcaaaatgagggttataagtaattgcctagctgatgaagcaatatactttaaggaggaggattgatctgaacgacttctacgatataataatcgtagggggaggtccggcaggatgtgcagcggctattgccgctgcacgtgacggatctaaagtgctgttggttgaggcgacagggacattggggggaatgggtacggcaggtatggttcccgcctggtgttatttttccgatggtgagaagatcatttatcgcggtatagccgagaagatttttacggaagcgcgtaagggagtacctcacgaagcagaaaatgcgatggcttgggtagacatcaatccggagcaattgaaattggtgtacgaccgttttgtgaagcaatcgggtgccgatgttttgttctttacccgtttggctggcgttgaaatgagcagtaagagtgaggttgattctctgatattggcctccaagcaaggactgactgcttataaagcgaaagtttatattgactgtacgggagatggggatctggcagcttgggccggtgctatctatgaaattggtgacagaaatcatataatgcagtctgctactcattgtttttctttggcaggagtggatatgtttcagtatacgatgggtgtccggttacatggagataatacagaaagtcccatttacgagatactaaagagtggaaaatatccattaatagaggataatcatttgtgccaaaacccggtaggtcccggagtagtgcagttcaatgctgggcatatcaatgtgaatacattggatgacaaacaattgagtgatgcgatgattcgaggacgtgaaatggcaaatcagtataaagaggcattgcaagcatatcattcgaaggctttcgggcacgcatttgttaataatacagcgcaattgcttggagtgcgtgaaggtcgaagaatcttaggcgactatgtgctaacgctggatgatttcaaggcacggaggcagtttcccgacgagattggacgtaacagctattatgtggacattcatattcctggttctgagagtgtgcattatgggaaaggtgaatcacatggtattccttataggatattgacacccaaaggatttaagaatttgctggttgccggacgttgtgcttcgtctgaccatctggtgtacggaagtatacgagtgatgaccaactgtctggtgatgggagaggcggcagggaccgctgctaacatatttatgcatggtcctcgagatgtgcacgagattgatgtccgccaattgcggggacgactacgcgaagcgggacaatattttttataacccctcttgcaaatcactgttgcgagaaagagattaaaagaatggatagaagaaaatttgttaaaaatataggcattctgggaggagtcattctctctggtcttcctttgagcgaagcgttggcaaaggaaaagggagatggaaaaactgcaaaaggaacctccgaagttgattgggatgtaatagttattggtggaggagctgccggctgcgcagcagctattgccgctgcccgtgaaggtgtgcgaacattgctggttgaagctgccggtatgttaggagggatagctacagcaggtttgttgtcagagtggattccaactccggttcagggagattttagctacagcggaatagccggaaaagtgttccgtacaacttgtgaaggtcttgcttcaaaactacagaatcgaatgtacaacacgcctattccaaccgagattttgaaaagtacgtacgagcgtctagtggataaggctggagtggagatatggcttaattctcgagcgatagaagtgaatatgcatagcgcaggaaggattgagtcgctgactgttgcttctatttcgggaataacggtttgccgggggaaagtctttatcgattgtacggggagtgcagagattgccggacgtgcaggagtttctttccaaaagatggggagagaagcgatatgggagaatccgggttttaactttcgggttggaaacgttgattattatacatatacttatcagtttaatgcacagcggaaagcgaatgaaaaggtgattgaagaacttgtgcaatcaggcaaatatccattgctgaaaaaatcgcattttaggtattcgttgacaaatccttcggtagttacgtttaaactagatgatgtccttgacaagttggaaggagaggatgtacgatctatatcgaaagcgcttgtgcaaggaagaagtattgccatacagatgttacaggctttacaagaatattttccggaaactttcgcttctgcggtattgctggatagtgcgacgcaactttatgttccttcgcgaagaattatcggtaaatatatcttgacaggggaggatttgaagaatcgtcgtggctttagtgatgaagtgggtaggaatggttatattgtcggcacgatgtatgcgtatgaaaaaggagatagtcatggtattccttatggagcattgatctctaaagaagtcgagaatttgctggtggccggaagtggtatttccgtcgatatggaaagttatgaaacattgagtacgataccggtttgcctggttacgggagaagcggcagggatggcggctgggttggtggcaaaaatgcaaaagaccgatgtgaactccattgatatagctatgctgcgagacggattacagagggaaagcaggaatatttaaaacgtaaatcaataaaagaacaatctgatgaaatatatcaaacttacattatgctgcttcttattcataattacgatagttacttatgggcagaaaacgtctgtgattccttctgctaaagagctggtggcctataaacttccacgaaacgaaatgtacaagaagggatggattgattttaacaagaatggggtgatggatacttatgaggacccgggtgcttctctggatgcccgtgttgagaatctactctcacagatgacggtggaagagaaaacctgtcaaatggttactttgtatggctttaaacgagtattgacagatgatttgccaactccggcatggaaaactaaattatggaaagatgggatgggagcaattgatgagcatttgaatggctttcagcaatggggattaccaccttctgacaatccatttgtctggcctgcatcgttgcatgcttgggcattgaatgaagtgcaacggttctttatagaagagacacgattgggagtacctgtcgatttcacgaatgagggaattcgtggtgtggaaagttttaaggcaaccaattttccgactcagctgggaataggacatacctggaatcgagagttagtacatcggatcggaacgatcacggggcgtgaagctcgtttacttggatataccaatatatatgcacctgtacttgatgtggggcgtgatcaacgttggggacgctatgaagaagtgtatggtgaaagtccttacttggtggcggaattgggcatagagatggcaaaagggttacaaaaggattatcaggtagcagctacagcaaaacattttattgcttacagcaataataaaggtgcacgtgagggtatggcacgtgtcgatccacaaatgtcacctcgcgaagtggagaatatacatgtttatccgtggaaacgcgttatcaaggaaggtggtattcttggagctatgagttcttataacgattacgatggatttcctatccaaagtagttattattggttgacaactcgacttcgccaggatatgggtttcagagggtatgttgtttcagacagcgatgctgtagaatatctttattccaaacatggtactgccattgatatgaaagaagctgttctccaggcggtggaagccggattaaatgtccgctgtacatttcgttcaccagaatcgtttgtattgcctttacgtgaattgatagctgaaggggctattgctatggaaacgattaatgatcgggtacgtgatattcttagggtaaagttccttattggtttatttgataccccttatcaaatggatttgaagcaggcagatatggaagtaaatagcttgaagaatcagaaaatagctttgcaagcttcccgtgagtcgattgtattattaaaaaacagtggaaaaacattgcctctctcaaaagaatcagtgaagacgataagtgtatgtggtcctaatgctgatgacaccagctatgccttgactcattatggaccactcgctgttgaggtgactactatattgcaaggaatcaaggagaaagtaggagagaaggttcacgtactttatacacagggctgccaactggtagataagaactggcctgaatcagaaatactacctcaagaacccgatgcgaaagaaaaggcagagattgaaaaagcagtcgaaaatgcccggaaaagcgatgtggcaattgtagtacttggaggcaacaaccgtacttgtggagaaaataaatcgcgtaccagcttggaacttccaggacatcaactacaattattacaagcggtcgtgagtgtgggcaaacccgttgtgttggttcttgtgaatggacgtccgttagctattaattgggcggataagtatgtggatgctatcctggaagcctggtatccggggtcgcaaggaggaaaagcggttgccgatattctttttggcgattataacccgggtggtaaactgactgtaacttttccaaaaacagtcggacaaattccgtttaactttccttataaaccgtcttcgcaagtggacggaggcaataagcctggtttagaaggagatatgagtcgcgtgaatggtgcactttatccttttggatatggattgagttacacaacttttgagtattcgggtttgactgtttcacctgaacggatcacgcctaaacaagaaacgactgtccgtttctccgtaaagaataccggcaatgtagctggtgatgaagtggtacagttatacattcgcgatcttctaagtagtgttactacttttgagaagaacttatgcggatttgaacgcgtacatctcgctcccggtgagagtaaggtagtaacctttaaaattcttccacgtgatttggaattgatgaatcggaaaggcgattgggtagtagaaccgggagaatttaaactgatggtgggagcttcttcggaggatattcgtcaggagaaaagtttgtgggtattaccttattccgaatgtaatattctagaaagaaaaacatcttccggttcctacctttcggttttggacaatgatccgaatacttgttggaccggaaataagggtgactatctcaatattccgatgaatgctactggcggggcgaataatattggtattcgctggaaagttcctgctgagaaattcgaaattcaggtatcagctggcggaggacagtttttgactatttacaatggcttttccgaaactgcaggagaaatgattttttatccgctggataagaaagtcattagtgatatacgaattttacttactcaagggagcgcttccatttcagaaattaagatagatggagttaaaatgtgacaaactataattataataactactaatttttatgatcatgagaaaaaatattcaaatgaattgtatgtttcagcttttgctgacactcttgctgatagccggatgtagttcctccgatgatggacccgaaagtcctgatacttctaatcgaactgttttacggcaagataaagattttagcgtgaattcgatggacttgggtagatatgtccgattggggttaaatcaggaaagtgtagatttggaatttaccttaggtacaaactctgtgcaaaaagtagaagtacgacctgctaacttgggtattagttacgatgtaaagggtaataaacttactttgcttgatgttagaccttgtaaggctacggtgattatcaatgaagattacaggaatccaatctatctttttgtagatggaagaacacctgctgagtggaataaattgtcggcaagcacgattcgctatgctaaaggtactcatactgaaaacttaattattgatcaagataatacgactgtattcttagaggaaggggcatccttggtcggatatatccaatccaacggacataaaaatatacgtattttaggttatggagtaattgatggccgtaatgcccagagagcaatacgtatggagaaatgtagtaatattgaagtctgtggacctgttattatgagtcgggccggttggaccacttcctactttgaatgtgatcaggtacatatacacgatgtaaagatattaggagcacaggtttactcggatggcattgatttggtggggacgtcaaacgtgactgtagacaatgtttttgttcgtactgaggatgactgtattgttatcaaaacaaataagtatggattttccggaaatgtggaaaacatcaccgtgaaaaattcggtgttgtggggtggtcctagtggcaattgcatggaaattggctgggaacttgatggaacttatttgcggaatatcggctttgagaatatggatgtggttcgtttagaaacatcgctcaacagatttaaacatggtgccatcactattcaccaatgtggtaactctacaatttccaatgtatcgtataagaatattcgtatggaagatgtcaatgagcagcttgtgtggattgagctcatccctgcccgtacagatggctggggaagtggaggtggaaacattgacaatatccattttgaaaatatggaatatactcaaggtgaagataatgatattttgattaaaaaatcagattcgggaactattactaatgttactttttctgggcttaaatacaagggaaagacggtagctgctatttctgaccctatatttgatatagttgatgcacaagtgaaaatagaatagtattttccttcctgccggtaatcgtctttatagattttttcttatatttgtgaaataaatctataataaatcatgaatttatacggtgatgaagcattcttgatagaatctctcagtagcggaaatcgggaggctttcgagtatgtatttaagaagtactatcaaagactcgtgagctttgctggtcggtatattcagaatgaagatattgtggaagatattgttcaggattgttatgctgtcttgtgggaaaaatgctcaacagttgcatctatttccatttcagtatccgcttttttgtttgcaatggttcggaatagttgcctgaattaccttcgacatgagcaggtaatccaaaaatatgaagttgagtatctggcttactcgcaaggagaagaaagactttatcatgctgatttcggattggaggtcgagcataaactcctttatgaggagctacaagagaagattgcccaagttgtggaatctttgcccgaacgctgtcgtgaagtttttattatgagccgctttgaaggattgaaaaacagagagattgctcaaaaactgaatatttctaccacagcggtagagaagcatatatcaaaagcaatgctcagattctcagagcgattcagagacgaatattcatttgatatttatattatcgtcatagcttggttgatagagccaatgttttaaactgtatttacattaaaaagcccctaaaacgaatattttaggggctttttaatgtaaatacagtgtagtttgtgcggatgataggactcgaacctacacgcctcacggcaccagatcctaagtctggcgcggctaccaattacgccacatccgcatgtgtagctttttgtttagcggtgcaaagataggaagattttctgatttggcaaataattcggtaataaagttattcacttaatatttcaaatgccctttcaatcagtgcatccttcttttgtgattctgcatctccatgctctattccttcttccagaatcttatccatatttacgtatacatctggctctattccattttccagaggctttttatacttgttaaagtgaggactggctgagaagcgaacactccaaccattgggtaattctgaagagaaaggtagcccggaacctcctccggtttggtcacctacctgaaatattctttgctcttcgttatcgttgtttagactgtgcatggcattcacaaaatcgtttgtggcactgtagcaacgacgattggtaagtaaaaccacttttttctgccaacggatgctattagagggttccaggtagatcggctccatttcagaaaagtcattatgtcccggaccggttttgtgctggatatatccggtcaatgtcttttcgttggtgaaacgggcggcaatacgggtggaattagtcaggtttcctcctccgttgtcgcgtacatcaatgattaatccgttgcagagcttcaaataatcgagtacatggtctaaattaccgtctccaactccggcactaaaactttcgtagcggatataacctatattattatcgaatattttatatttcaaaccagcagatgtacgataaccggaactggcacttcccaaatagtaattgtataagatatcctctctatagttccaaggatatccttgataccaggcatcgtaatatgagatacgactggaggaggagaggttgacgtgcccgtctttcaactcatatagcatttgacttagtatatcaaacaggtcgtcatccgaaattccgggtttcaccagttttccatacttgtcgtgaacagcgtcccaatcaatgcctttctcttccagaaaacaataccgttcatcaataatcttccatagttgctcgaagtttcctacaggatcattggcatattcctcttccctgatacatccggtcactaccggaagacaacagagcagccaaagcatttgtctaatattatttctcattcttaatcttgtattaactctcaactctcaattttcaactctcaacttaataagctcttaccgatgacggtagaacactggctccttttttgtttcggatacggtataattctttcacaaagcctaccataaacacatgtgagtaggtgtgcgtcttgatattgtttacattggactgctgcaaatccgccagatagctgaaacgcattttagtatatcctataggaaagtcgacggaaagcatttgccgtagcgaaggctggttatgtaaagaagtgaatttgatgactcctccggcatttcccagtgagaaaatctcataataagattgtccgtaatggggggaaaacatgactcccattaccggcaaattcacttgatagcgcaatactaccggataacgtttgattttcagatgccagatagccattcccgatgcatccagattgatatatgctcgtgccgaagccgggttgtttgtgttccgaagattgtagacaaaacctccgttggcgtctagcaatcctcctgccaacagtttgaagttctctgtcagacggaactgataatggagcccgtagttccagttaaccaatccggaaaatgtattgttgttgtcggctcggttgtgcgtatagcctatatccgcctgaaagaaattctgtacagacacattcccgtcaaaaagcttggtcatacggattgtttcgcgggaaacacggaaatcgattcctttgtattcctgaggcgaaagataagtatcaaacacgttcgtgaatccgacaccgtacatcgtagcacgtgttacataacgatgaatcagcagactgtctgcctgcgcttgtaatcttgtgcaaagggcgaacaggatgcatcctgccagccctagatatagtatttttttcttcatcagaataacttcatctgccccgtgatctcatcaataatatcgctctcgcttttgtcgctatccggatccaagttttccggttcttcttccggctcctcctgagtttcttgtacaggctcggggaagcgggtaggttccagctcgttaatagtttccactgcgtaggtggtgatacgtttgcctttcgctttgaaacctttgactgcgataaattcttcggcttcaatctccagtggatcacggaagctatcgtgtcctccgaatataacttccaggcgcggatagtactcgtccgtcagcagaataaggcgattgttcttattctctcccagatagttctgcttgcggttggaaccttcaaagcagaaacgtttcaaatatggataattctgttggtctgcatcatatagtgcggcggtccataccttgttgggatcgaacttctcgacaatacttacattatcttcgtaatggttgctcaggtcgaagttgctggtatagaagtcaccgttgttcaagacaaccaatatggtatcctcgctttggaattctccgagatattctccccttccgtcgtagttgaggcggagtatatcccgatcaaaccagactttacgtcctccgagagtagaaccgcctctctgtttcaaggcgatcttatgcaccggaagccgggtgaggataatgcctcgtgcctgtcttcctttgatacctacttcgctaaagtcctgttcaaagataatacggcggacacgcgggttcggtttcagtgtcaccttgatgatttcggcctccccgttcggattggcactgaaataagtgatacgtgagtccggagttccttgagtgacatcgtattcacggtcgcggacaacggaggttacagcgaagcgtttgacatacgttgtcccttcttttccgtcacggtaggccacgttgtaaatcgtgcgcttgtcgttcttcttgaatacattgacatagagcacgtttttaccgacaaacttcttatcggcgacgggagtaacaatatatttaccgtcgcggaagaagatgataacgtcgtcaatatccgaacagcatgccacgaattcatctttcttcaaacttgttccgatgaatccttcttcacggttgatataaagtttttcgttcgcttccactactttggcagcttcgatggtgtcgaagttccggagttccgtgcggcgcgggaaattcttgccgtatttgttcttcagcatttgataccagttgacggtataatctacgatgtgagccagatggttatcaatctcggcaatttcctctttcatcttggcgatcagttcatccgccttgtctgaattgaatttcaggatacgtcccattttgatttccatcagcttgaggatatcctctttggtcacttcacggataaactgcggatagtaaggtgtcagacgcttgtcgatatgttcgcaggctgcatccatgtctttggactgctcgaactctttgtctttatagatacgctcttcgatgaatattttttcgagtgaggcgaaatgcaatgcttccagtatttcgcctttcttgatttccagttcctgcttcagtaaatccaacgtgttgtctgccgactttttcagtactttactgatggttaggaaatgtggcttgctgtcatcaatgacacaacagttgggggaaatgcttacttcgcaatcagtgaatgcatacagtgcatcgatagtcctgtccgaagaagtgccgggcgcaagatgtaccagtatctctacgttggcagccgtgttgtcgtctaccttacggattttgatctttcctttatcaacagctttcaagatagagtcgatcactgtcgaagtcgtctttccgtatggaatttctgtgatagcaagtgttttattatcaatcttagtgatcttggcacgtactttcaccgctccgccgcgttctccgtcgttgtatttggctacgtcgatagaacctcctgtctggaaatcaggatacaattggaattcctctccacgcagataactgatggaggcatcgcaaagttcgttgaagttatgcggtagaattttggaagaaagtcccacggcgataccttccacaccttgtgccagcaataacgggaatttcacgggaagagtgaccggttctttgtttcgtccgtcgtaagaaagtttccattcagttgttttaggattgaagacaacgtccagcgcaaacttggacaagcgtgcttctatataacggggagcagcggcgccgtctccggtaaggatattaccccagttaccctgacaatcaatcaacaggtctttctgtcccaactgtaccagggcatctccgatagaagcatcaccgtgagggtggaactgcatggtgtgtcccacaatgttagccactttgttatatcgtccgtcgtccagacgtttcatggaatgtaggatacggcgttgtaccggcttcaaaccatcgttgatatgaggcacggcacgttccaaaataacgtacgaagcatagtccagaaaccaattctggtacatgcctgtgagctgatgttttacgctttcgtcccgtgcgtccgccggtttgtaatctgaatgtccttccggtatctcgttgatttcgtcactcataaattcgtatatactataatattttaacgcatacgcaggcaaaaatacaaaaataaaagagatttcggaaaagaaagggggatattccgaatgttaaaagggtataaattgacttattctttttctttagttattgtagggatggtacaaatatataagaaaactttgatttcctataataaagacttaattttgttgcagccaacacttatctgacacccgggtctcatgagcactgacacccgggtgttggtatgtttgacacccgggtctcaatggtgttgacacccgggtgtcagatagaacgcgagtataaacgaaaaaagaaaggagtataaacgatggcagtgccttatgtagtgagaaagaaagccgatttaacatcgggagaaagaaaagaattatggtatggtgtacccaaaaaactgatagatccgattcggaatagagaatttgccgagtacatggaaaaacggagtggatttcatcgcgggcagatagatggtatattgacggaaatggttgatgctatccgtagtctgttgtctatcggacagccggttactatcgaaggacttggcacattccatacatcactgaccagtccgggatttgaacgtcccgaacaggtaactccgggaaaggtgtccgtttcacgtgtctatttcgtggcttgtcctgaatttagccgggaagtgaaaaaaatgaaatgcatgcgtattccttttaatctgtatatgcctgaagagatgctgaccaaagaaatgaagaaagcggaccgggagcaggagcgggaagaatatgaccgtatggtggcaccggaaatcgaggaagaagttcaggaataagataaattaataccctctctgtcttatttataagataaatccctatctttgtggcactttttacgaaaaaagcaaattcaaattaatagatatagaaaagaaaatggcacaagaagacgtttttaagaagcttgtatcgcattgtaaagagtacggtttcgtatttccttcgagcgatatctacgacggactaggcgctgtgtatgactacggtcagatgggcgttgaattgaagaacaacattaagaaatattggtgggacagcatggtgctgttgcacgaaaacattgtcggtatcgactctgccatctttatgcaccctactatctggaaggcttccggacacgtagacgcattcaatgaccctttgattgacaataaagactctaagaaacgttatcgtgccgatgtactgattgaagatcagttggcaaagtatgacgataaaatcaataaagaagtagcgaaagctgccaagaagttcggtgaagcgtttgatgaggctcagttccgttctactaacggacgtgtactggaacatcaggctaagcgagatgcacttcatactcgcttttcaaaagctttgaatgataacaatttggaagaactccgccagattatcattgatgaagaaatcgtatgcccgatctccggtactaagaactggacagaagttcgtcagttcaatctgatgttctctaccgaaatgggttctacggccgatggctctatgaaaatttatctgcgtccggaaactgcacagggtatttttgtaaactacttgaatgtacagaaaacaggtcgtatgaaagttcctttcggtattgcacagattggtaaggctttccgtaacgagatcgttgcccgtcagttcatcttccgtatgcgtgagttcgaacagatggaaatgcagttcttcgtaaaaccgggaacagagcttgactggttcaagaaatggaaagaaatccgtttgaaatggcataaggcacttggcttcggagatgcaagctaccgttatcacgatcatgataaactggctcattacgcaaatgccgctactgacatcgaattcctgatgccgttcggattcaaggaagtggaaggtatccactctcgtactaacttcgacttgtctcaacatgagaagttctccggcaagagtattaaatactttgatccggaactgaacgagtcttatactccgtacgtaattgaaacttctatcggtgttgaccgtatgttcctcagtatcatgagtgcatcttattgcgaagaacaattggaaaatggtgaaagccgtgttgttttgaaattgcctgctgctctggctccggtgaaactggcggttatgccgttggtaaagaaagacggtctgcctgaaaaggcccgtgagattattgataacttgaaattccatttccattgccagtatgatgaaaaagatagtatcggtaagcgttatcgccgtcaggatgctattggtactccgtactgtgtgacggtcgatcatcagacattagaagataactgtgtgacattgcgtaaccgtgataccatgcagcaggagcgtgtcgctatctctgaactgaataatatcatcgcagacagagtaagcatcacttctctattgaaaactttacaataaacctttgacgaatgagtaaaaagatctatttattctccttagtattgttggctttgacgtttaccgcttgtagcgaaacggaagaggccggacgttatgacaattggcgtgcgcggaatgaagcatttatagattccattgctggagctcatgctgatttaactaagcgtggtgcattggattctatccatatgatatcctatcctggagttcctatttattttaaaaagaaaactccgataggtaatggagtaattcaggataaaattccatattatacagatttggtaacagtatattataaaggaatgtatattcttggaagtgttgatgagcaagataattttattggagaagtagttgaagggtcttatacagaggcaaaccctagtattgatttttcgaaaacagaagagtttggagttaattcacgtgtaataggcttgtctgagattttacagagaatgaaagttggagaacgttacgaagtttatgtcccatggaaatatggttatggttctagtgaatatacaccaattggttcttcaataacgattttaggttattcgactctaatatttgatattcagatgatagattgtaaaaaccaatgattgtattttttatggaactaagctgttaaggtaaacttaattatttataagatagtcgtttggtttttaaagcagacacttttagttcggggtattatgaatatgaaaaaactagggcaattgacttatttatagttagggatatttctaaaataataaaatttaaggcaactacttcattgcgagttagttgccttttttgtatctttaccatgtgtttttattttaatccccccgtttgggctgtcaaaccgttttttggggggatatagggaagtggcagtaatgccgcttccccattaagaactgtatgtgcgactgtcaccgcatacagctccgataattctaaatttaattttcacgaaattaaaccggctctttcgatggcttgtttccaataaagttttattatgcacgttgatagtcatattttcgtttccgcctttcaacgtaggtatccattccatgaaggggcaaacggattggcttcgcacttcaccttgatatgtcgcctgattggaatgtctgccagtttacgtagtgtgaacttatcctttataccaccgcatacatattcgaatccgaatatccagtttctgcttccatcgcggataaagtatttgttccatatccattctcttgacttgtcggtattcttgcgatatgcccatctctttatctgatttatcaggacctgatcacatcggtagaacacttcctttgaaaccacatgactataatagttcccccatccctgtattataggttgagtttccctatcagctcctgctgcgacaatgctttgcctttggctaggattatttcatgcagtttgacggtgaaccgtttttgacttttcttagatggcttgattatcaatgtaccgttatgctttcggacattgccccccaaaaaaagcgaaatcctttgctgatgttattagtgtcttctttccatgccgtcaagtgcggcattggcaagtgtcggtgagatgataccgccttgcggagtaccctttacgatcggttggagcagtgtattgaatacgactctacttttcagccatttccctaagatatgcttgtcgattcgtacgttatcgagaagccattcgtggctgatgtggtcggagcaccctttgatgtccccctccaatatccattggggagaataatccctgcttagccatctgtgcagggcgtcaatggcgtctgccgtgcttctgaattttctaaacccatgagagttagcatccgctgttgcttccgtaactggtttcagtgccatcagataaagagcctgcatggccctgtccctcatggttggaatcccgagcggtctcatctttccgttcttcttggctatgttgatccttttcagtgagagggctctgtatcctctccgctttaaagaacacactgcgtttactttcttggcatcggtgtcccataatatatggtcaatctctgccgtacgcttgcctttattggatgtcaccttctttacagctaatgtcttggcttcgtaagaagtgacaagaaggtgctgcaaggatctgaccttgttgtaccgtttctttttctgggtctttgctattcggatttgcagctttctaaccttgcactcatatttggaaaaatctatttctttccatgtattgctgtgtttggctgaagatgcacattcggctttcgcctgtttcttcatttctttcaagttctacaatcgtttcacaaagaattatcctgcggaagtctgtctgctttcgcatgaggtgacgtttaaacctttatcctccgcattacacggaagctttcgctttctccgcaatcctttacccgcacctcgtttggcttttcttgcgattggcttacctacccgaatacaggtaggagaaactacaggcttaccaagttccatacaagtaactgatgattgacttagagtccgcctctctactggcagtatgatattcgtgtagccttacatccccaaaagactatcctgactgtccgccttttgactatagcttgtaaatatccgtaagttattttttattacgatggtgcagcaattcacatatgttgctcatatcagtcagcctagcagcctatacattgaatatttctgtaaaggacagcattgtcaagagggattcgcaccaaaccattactagtaaagcacgcctctttaggctactattgacggaacaataggttcagacgcagtgctaaaccattacttgtacgactttttgtcgcacggaatgcttaaagatacaaaaaaaggcaactaattcgcaatgaagtagttgccttaaattttattattgtaggaatatccctatttagattgagtagtatttagaggatttatagtagatttttaatctattgttaaactacattattattaattcaagtcttattgaattcgttttgtcatctaaaggatcaggtaataagggaataggatttaaactaacgttagcaaaatctttgattcctaagtcaaggttaggatatgtgatttcaaaagtgcaggatcttccttgacaatttacatgttcaaagaaagtagctctacatctcatatatgtggagttggtggcgcttattccatttaacttcatagaagttatttgatttgctaaattatatgttcctaaatcatttatttgtaaataaggtctttgtaaattaactgtaaaacttcccttatcccctctatatttggtcctagtatagaccgtaagagtagcactactaattccagttgctcttgtaacaggactaattgaatctttgttaaggctattttgagctaagaaaatggaatatgaattaaaatattcttgtagtccattggaatgtatatatacagaaagattgggattctctttaaatgagtttattatattgtctatttccttatcatcatagatgatattatctccatttctttcatattttgaagtatatatgtatccttgatacttaaattttacaataccggttttagcaataggattttcatctacaaattcttcttcgaatgtcttttgactacatgcttgtgtcattcctataatgacacaaactaataaataattaataaacgttttcatgatactaagatttaatatttaacaaaatgttttttgctttcccatttattttgagctctttataaatgattctgcaatgtaatcttttattttttactacccaagtaaattgtgatttatcttttaaaatctgtttgggttttcttcaataattccattagaggtttaaaaaaatattggtccagatcattttcctcaaaaagatattagcatagacattatataaatagctgtacatgtcgtataattgagaataatgttttcatagaataatttatttgaaatagatattatgggagtaaaagcagagaaagatgatttagattattatttgagtgagaatagaatatctcgctttgaagtttaaaaatggaggacaaggtgtttgcttatttggttcatttttttttattaaaaatagagatgcgttggggcaattgtgtacgcattgcatatacaatgctggaacaacagttttattatttctcgaattagaaagatcttttacctacatacttaaacattttgaatgattttgtttgtgatatgatttccttcctatcttaaaatactggacgaatatgagcagaggaaaatgaactaaatgtaattttgtttcttatgtatagagcccaaatagattcgcgttgttttttatactactttctctcacctgtaaatgagtcggaatgaccacttgcttgacagccttatctcctttaatctgctcaatcaatagccggcaggcagtttctcccattttataagtttgatgggacacagccgataatttaggctctacgtaattggcgtgttgttcgtccgtatatccgatgatggcaatgtcgtccggtatacgcagtccatgttttttgataacttccatagcggcaaaagctaaggtatcattcatggcaagtatggcatcaggaggctgaggaagcgacagcaaggtctctgtggcaattttaccctcctcgtaatcaatcttccggcagacgaccaactctttctcgatgggaatccggttgtcacgtagagcttccagataaccatgctttcttttctttacgatgtccagatgattcgctccacctataaacgctacccgtttgctaccattatccagaagatgttgtgttgccatttgagcggattgcacaccgtccgcaacaaccgaagaaaactgttccgtcagacaaacacgatcaaatagaataagcggcatattgatatcttttagtgttgcaaaatgggaatagtccgtagtctcctgtgataagcaggcgatgataccttccacacgcatatttaccaggttctcaacgttccgtttctcatgctcgtatgactcatgcgatgtagtgataatcacaaaatatccgttggcgatagccatattttctataccgttcaagatagaggcgaagaaatgagttacgatatccggaacaatcactccgatgatacgcggggcatttttccgtaaactcatggcaaaaggattgggacggtaattcatttcttttgccagttccttagccttggcgcagagctcacggctgatttccgagctgtctttcagggctctggatacagtgggaatcgatactcccaatgcttgagcgagatctttgagtgaagtatgtttccggtatttcatttgaaggtcttttactttgattcttttacaaagaaagtacattcccggataaatacgcatatctgaaacaatattttttacgtaaaccattacgttgctttttagtggctttaccgctatacggaaatcattcctgacctatttttgtcgcatacaaaactatttaaaaccaagaagtatgcaataccatgaaatcggaaagacagggatgaaagtgtcatcccttagtttcggagcctcttccttaggaggagttttccatgatttaaaagaacaagaaggcattcaagcggtatttaccgccgttgaatcgggaatgaattttatagatgtctctccttattacggacattataaagcggagaccgtgctaggaaaagcgttgaaagagcttccgcgcgaccgttattatctttctaccaaagtagggcgttatggaaaagatggagtgaacacatgggattactcagccaaacgggtaactgagagtgtttacgagagtatggaacgcttgcatatagagtttatcgatttgataaatgtacacgatattgaatttgccgatttgaatcagattgttaatgaaacattgcctgccttagtagcactgcgtgagaaaggggtggtaggccatgtcggaatcacagatttacagttggagaatctgaaatgggtaatcgaccactcgccaatcggcacagtcgagtccattctcaatttttgccattattgtctgtgcgatgataagttagtggattttctggactattttgaatccaaaggaatcggtgtgattaatgcttctccgctttcgatgggactgttgagcgaacgtggtgttcctgcctggcatccggctccccaatcgttggtagaagcctgccgtaaagcagtggaacactgcaaagccaagaactgtccgattgaaaaactggctatgcagttctctgtcagcaatccccgtattgccaccaccctgttcagtacaaccaacccggagaatgtgaaaaagaatatcactttcattgaagaaccgattgattgggagctcgttcgggaagttcaggagattatcggagaacagaaacgtgtaagctgggcaaactcataaaacgaacttgttggtatggactacacaatcattgatgcacatgctcatttatggctacggcaagatacggtcgtagacggactgcctattcgtacgttggaaaacggacgttcggaatttatgggagagattcgccagatggttcctccttttatgatagacggggtgaatagtgcggaagtctttctttcgaatatggactatgcacaagtatctgccgctgttatcactcaagaatttattgatggtattcagaatgattatttgtcggaagtcgtttcccgttatcccgatcgtttctttatttgcggtatgtgcgaatttcgtaaaccgggatttctggaacaggcaaaagagctgatcgcaaaaggttttaaagccatcaagattcctgcccatcgtcttttgctgaaagaaggaagggtgatgctgaacagcgaagagatgatggaaatgttccattatatggaagatgaggacattctgctttctattgatctagccgacggagccacacaggttcctgaaatggaggagattattcaggaatgtccggatttgcggatagctatcgggcacttcggaatggtgactcgccccgactggaaagagcaaatccgtctggcacgtcattccaatgtgatgattgaatccggtggaatcacctggcttttcaatgacgaattctatccttttaaaggagcgataaaagccatccgtgaagcggcagagctggtgggcatggaaaaactgatgtggggctcggattatccgcgtaccatcacagcgatcacctacaaaatgtcttatgattttgtggtgaagtcttccgaattgacggaagaggataaaagactctttttaggagagaatgcccggaatttctatggatttacagatctccccgtgcttccttacatcaagaatatgtccgaatgattgagaaaacaaccttatcgtaaaactatattcatgccatgaaaaagaatacatatacaatacctttagctttggttttctgccttttcttcttgtgggcgataagcagcaatctgcttcctacaatgatccggcaattgatgaagacctgcgagctgaatacctttgaggcttcttttacagagacggcctattggcttgcctacttcattttccctattccgatagctatgttcatgaaacgatacagctataaagcgggaattatattcggacttatcctagctgccatcggagggctgctctttttccctgccgccatactaaaagaatattgggcttacctttgcatcttttttatcattgccaccggaatgtgttttctggagacggctgccaatccgtatgtaacagtgctgggtgcctctgaaacggctccccgccgattaaacctggcgcagtctttcaacgggctcggagctttcattgccgccatgttcctaagcaaacttatccttagtgggaatcattacacacgggaaacgcttcctgtagattatccgggtggttggcaaacctatatccaactggaaacggatgccatgaaacttccttatctgatattggcgttactgctcattgccatagccgttctatttgtcttttcaaagttgccgaagattggagatgaaactgcttcttcagatgcagtgacggctgatgacaagaaagaaaaactgatagacttcggagtattaaaacactcgcatcttcgttggggagtgattgcgcaattcttctataatggcgggcagacagccatcaatagtcttttcctggtctattgctgcacctatgcgggattgccggaagatacggctaccactttcttcggactctatatgttggcttttcttttgggacgttggattggtacaggcttgatggtgaaattccgtcctcaagatatgctgttgatctatgccctgatgaatatcctcctgtgtggagtggtgatgatatggggaggaatgatcggactatatgcgatgctggctatctcgttctttatgtctatcatgtatcctactcaattctcattggctttaaaaggacttggaaatcagacgaagagcggctcggcttttcttgtaatggcgatcgttggtaatgcctgtctcccgcagttgacggcttatttcatgcatattaacgagaacatctattatatcgcgtatggcgtgccgatgatttgttttgttttctgtgcctattacggatggaaaggttataaagtaatcgattaataaatttattatcaaatacatatcaaatgaaagcagttcaaattatcaatccctccgaaatgaaggtggttgaactggaaaaaccggtcgttggagccggtgaagtattagtaagaatcaagtatgttggtttttgtggttccgacttgaacacattcctgggcaaaaatccgatggtgaaattacctgtgataccgggacacgaagtaggagcagtcattgaggaaatcggtccggatgttccggcaggttttgagaaaggcatgaatgtgaccttgaatccatataccaactgtggaaaatgtgcttcttgtcgcaatggtcgtgttaatgcctgcgaacataatgaaacattaggtgtgcaacgcaatggagtgatgtgcgaatatgctgtattgccttggacaaagattattccagctggcaatatttcttctcgtgactgtgcgttgattgagccgatgagtgtcggatttcatgccgtatctcgtgcacaggtgatcgacaacgagtttgtgatggtgattggctgtggtatgattggcatcggtgccattgtgcgtgctgctttgagaggtgcaacggtaatcgctgtcgacttggatgatgaaaagctggaactggcgaaaaaggtaggtgcctcttatgtgattaactccaagacagaaaatgtgcacgaacggatgcaggagattacggaaggactgggtgctgatgtcgtgattgaagctgttggtagtcccgtgacttatgtaatggcagtggatgaagtcggtttcacaggacgggtgatttgtatcggctacgctaaaagtgaagttgctttccaaacgaaactctttgttcagaaagaactggatattcgtggttctagaaatgccttgccgacagacttccgtgcagtcatcaattatatgaaagaaggaaattgtccggtagaagagttgatctcgaaagttgccaaacctgaaggagctttagaagctatgcaagaatgggcggctaacccggggaaggtattccgtatcttggtggaattctgattgtgggtatattggtaaagtttgaagtataattagaaactgtctgattataagatttgtctctgttctatatctatgtgtaaccgttgttttttaatctgtttcaaatattattctaattgttacattattcgtgtcctttgttttaacaactgctgattaccaatgttatagcttactcagttccaatattttcttttccaatgtcaggtcgtcggtagtcatttggggagtggggatgttacacatacgtataacgtctccttcacgacaggtatagctgtaatagagacgctcgatttcactcagctcatcgtaggatttcaggttccctttttgttgaagaaacttggaacgttcggcattgtcggtctgtttaaccaataatatacggcgggcgatagggttgtaattataatcaaagcattggtaaatgccgcgtaggaaaggcggacggtcaaacatcggcagtttgaggcaaatattgaacatggaaagttgcggggcatgactctcattgaaaacaagatagagatgactcatgccattcatcagtccgaatccccaatgagtggtgccatgagcattcgtgtgtcccacttcgatgtagttgccattctcggccggagcgatgaagtaaggctcgattttcaggtcattggtgttggaggagagactgtagctggtatatatgccactgaaatttgtgatatgattcacactttgcctggcgttgtgttccagttcggaaagaaaaggattcatactgtccggcttttcttttactaccacctccatagcgaagagtgcctgtttcatttgcggaagtagtccgaagagtttctttttcgaaagattattgacccacattaaagcgttgtccaatgcttcgttgtcatccatccctttttccacatttttgaagtatgccgggaatactgtggaatacatggcggacaatacgctcggggtgagttgtgcttgttcggccatttctttcatcttgataccctttccacgtaggaaagtaatgcggtcgtagatttctttcagctcattcatattttttattgaggagttcattagcttgttacaaaaatagctttctctcttgaattcaactctctatacggtgacttttattgtaaaaaggttgttttgtagcctctttccagtgtgttacattacaattacatgaatatttctgaattatttcgtacttattattcctgttttattcattttttacctcgttgggtggctctacttttgcgatgtcaaaacgaagaagaatatgaatttatcactgaataaactgataggacaaagaccggacatacaatacggtaaaacggaaagacatactcctgactggcttttcattctctggatgggtggtacggcactattgtcttactcgttggtttacgctttgcgtaagccctttactgctgctgagtttgaagggttgacggtggctggtatggattataagattgtggtgagcattatccaactcatcggttatgtatgcgccaagttgtttggcattaaatatatttccgaattgcagccgcagaatcggttgaagttcattatcggatctgctgccttgtctgaagcctccctgttggcgttcggtctgttaccattgccctataatatagtggcacttttctttaacgggctttctttgggttgcatgtggggagtgatattcagctttctcgaaggtcgtcgtactaccgatattctggcaagtattatgggagtgagtatggcgctgagttcgggagtggcaaagagtctcggactttatgcgctgaatcaacttcatgtcagtgagttttggatgcctgcactcgtagggggattggcctttccgttgctttgctttatgggatggatgatgaccaagtttcctcgtcctacggcagcggatattgcagcccgttccgttcgtgtcactctcaacggacagcaacgttgggcgctcttcaaacaatatatgcccttactgcttttgctttttgtcgccaatctgttgcttactgtacaacgtgatattaaggaggatttcattgtctgtatcattgatgtggatacaatttcttcctggctgtttgcccaacttgataccatcgctacattggtattattgtccacgtttgccgtactcgctttctccggtaatcatttgaaagtactttatacattgttgggactttctaccgcaagtatggggggcttggctctgctaggtagcggagaggtacagttgtctactactttgtggctctttttgcagacgctctgtatagacattgcttaccttagtttccaaaccattttctttgaaaggttcattgcttgtttcaaagtgaaggggaatgtgggattcttcattatcactatagattttgtcggttatgtgggtacgttagcattactgctgtttaaggagttgaaagcctcgcatatagactgggcggtgttctataatgagatgagtgtctttgtaggcataacctgttgcatcgcttttgccgctgcagccgtctatgtgatgaaggctaagaaaatcccagatacgggtagcacaagagaggtaaatgacatgaatagttacaacgaattattaacttcaaatccaacgatatgattgacatcaattacactagaatgagtaatatcaataactgcaatatgaaaaaaatagaatgcgtgattatggattgggcgggtacttccgtcgattatggatgttttgcaccggtagcggcttttgtggatagtttcaagcagatgggactgactgttacggctgccgagacacgtgcccacatgggggtgactaagattgaagagatacgtgctttgttttccattgaacgggtaggaaaggactttcgtgagaagtacggacgtgattataccgaagaggatgtgcaggaatgctataaacgtttccaaaaggtattgttcgatactttggaagattatacagagcctattcccggtgtggtggaggtgattgccaaactacgtgctcagggaatcaaaatcggttctactaccggatatactcaaaagatgatggatgtggtaattcctgccgcagaaaagaaaggttacaggattgataattgtgtcacttcggacaatctgcccggtggtcgtccgaagccttatatgatttatcgcaatatgtgtgatctggacgttgcctcccgtttctctgtgctgaaatatggtgatacgattgcagacatacgtgaaggtgtgaatgccggtgtgtggagtgtaggtgtaataatgggaagtaacgaattgggactgactgaagaagaaacccgcactcttccgatgggggaactgaaatgccgcatggctaaggtgcgggaccgtatgtatgccgctggtgctgattatgtggtggacacgattgccgaactgccgatgttgatagaggatatcaatgaacgtatggcattataaaagaaagaataataaaaataacaaaccgataaatgaataaatttaagataatatgagaccttatttacttttgactcccggtcctcttactacaaccgacactgtgaaacaagcgatgatgagcgactggtgtacttgggatgaagattacaatcttggtattgtagaagttatccgtaaagaattggtggagattgctactagcgctcctgacgagtatacggctgtgctgatgcaaggtagcggaagtttttgtgtggaagccacacttggctctgtagttcgtcctgaggataaactgttagtagcagccaatggtgcttacggtaagcgtatgggcattatttccgaatattaccatattgattgtcacgtgatgaggtttgaagaaatagaaccggtgaatgccaataaaatagatacttatttgaatgaacatcaggaggtgacgcatgtgtctgtagtacattgtgagactacgaccggtgtgctcaatcctttggaggagattgccgccgtggtgaagcgtcacggtaagatattgatagtggacgctatgagtagctttggaggagtacccatcgatatggcaaagttaggtatcgatttcttgatcagtagtgccaacaagtgtattcaaggtgtaccgggatttggctttatcattgcccgtcgttctttgatggagaaatgtaagggaattgcccgttctctttcgctcgatctttatgagcaatgggaaacaatggagaaaggacatggaaaatggcgttttacctcgcctactcacgtggtacgtgccttcatgcaggctttgactgaattgaaagccgaaggtggtgtagaagctcgtcatgcccgctactgtgagaaccatcgcgtattggtggaaggtatgcgcgctttaggctataagactctgctgcccgatgaacagcagtcgcctgttatcacctctttctattatccttcggctgactttaactttaaagatttctatctgaaactgaaagctaaagggtttgtcatctatccgggaaagatatcacaggcagatactttccgtatcggcaatatcggtgacgttcatccgactgactttatgaagctgatagaaacgatcaaggaaagctaatctacggctgatgtaacggatcggaatgatattggatgagtccttccatcgggctttgcaaaatctttccgattctaatacctgtctcttgtgctgcctcttgaagtatctctttgtaacaatgagctaccgatcctatgaaatgtgccggatactgcgtgtaatcatattgcattacatttcttcggagaaaagcaatgaagctgcctagcactaattgtcgtattccaggttcttccagatgttgtgctataaaaggtgacaggcttgccagaaaacgattcgggaagggctgacggtaaacccggtcaatgatttcgggaactgtcaggtcgaattgttttagaaatacttctttgatggcgggagagagttgattcttcaagatgtcaccgactagtaacttgcctagaacagctccgcttccttcgtcacccaggataaagcctaaaggagaaatgtggttgacaatctctttaccgtcatagaaacaggagttggaacctgttcccagtatacaggtaatgcctgcttcacgaccgcatagtccacgagcggcagccagcatatccgagtaggctttgatatttccgacaacaggtaaactgtcggctattgcccgccggagggtgggagctttctcgggtgtacagcctgcaccgtaaaagtaaacagagtcgattgttccttccggcaattgcggcaggagggaatgtgtcagttcttgctgaatttcttcttctgattggaagaagggattgagtcctttcgttccaatccttttgatgggtgtattatcgaggatgacacaccagtcggtcttggtagaaccgctgtctgcgataagcatcatagtttactgtatattttcagtttaatatcttaaatataatcacgtgaatttattgctttttccgaaagaatcatccaatcggttgcgaatcattaatgaagcaataatactgggtatcgtacaaatacaaatccagataaagaaattggtgtatccgagatgttcttgtatccaccctgccgacataccgggaagcatcattccaagtgccataaatccggttccgatagcataatgagctgtcttgtgctcgccttcggcaatataaatcagataaagcatataggctgtgaaaccgaaaccataacctagttgttcgatagctacgcaggtggaaatcaatatcgggttgttaggagtggctgcagccatccatacatataatatgtcgggaaggttgatggctaatgccataggtaatatccatttcttgaatccgtcacgtgaaacgagaaagccgctgataattccaccaagtaacaaggctatgacaccaatagttccgtatatcattccaactgttgctgtggatagttccaacccgcctttatcggcatggtcgagtaggaagggggaagcaatcttggctagctgcgattctcccaatcggtaggtgagcaggaaaaagaacatgagaccgaggtgtttctttttgaagaaagtgacaaaagtcagaagaaagtcttctaatagcttacctgctgtgagtccgggacgtttgacatcggaatcgggatgggggaggataaatcgatggtacaaagtaagagccaggaataatccggccaggaggtagaaagtgatgctccatgccagaggtatattgccttgagaggtttccaaccatcctgcaagcatgacgagaataccttgcccgaaaatattggcgagtcggtagaatgtgtttcggatgcctacaaagaaagattgttccttgttgttgaggccgagcatataaaaaccgtctgctgcgatgtcatgggtagccgaactgaatgccaataaccaaaagaaagcaagggtgaattgtacgtaatgtgccgttgggataaaaaaggcgatgcctgcaaatccggcggcgatgaacccttgcatggcgataatccaggaacgtttcgttttcaccagatcgacgaatggactccataacggtttgatagtccagggaagataaagccaggaagtgtataaggctatttccgtattggataatcccaaacgcttgtacatgataacagcaatcgtcattaccgctacgtatggcagcccttctgcgaagtagagggtgggtatccagctccagggatttctttttgtagtgggtgttgtcatggcattcgttcgattttatttatattgtttttcaagcgtactaccggggtaatagtgagatagtatttcttcatacttataaccttgttctcccatcacggctgcaccgatttgacaaagtcctactccatgcccccatccggctccggtaaggatgaatcgtgaagggagttcatctccgtactccttgtctatgacaaaagcggagctgtaaagatgggacgttgatagagtgcggcgtatctccaactcttttccaatgatgagtgtccgtaaggttcctacaatctttagtcggacaagacgtccggatgttccccgttctacaggaattaaatcaatgatttgtccgaaatcaatccctgaacgttgatgaatcagttctgaaagctcttgttgcgaataactgactttccaacgatagaagtctgcagtttcctgatcgtaattgtttaagatttggcttagaattttcttatcctgcgtgttacagaaagcaacaggcgaggtgcgtatccatttatcagcttccgcctctatggtcaaatcgggaagttgtttttcagtcttgctatcccgttgtctgattagataaggatgctttacgttttcccaacaattttggaactcttcaaaagctccgccacaacatttagagaaacgggcatcacaaatcgctcctttatacatcagcacttccccccgcgtggcggagactgcttcgatggcttgcggtgttgaggctcgtgtaattccctgataacgctggcaatgatcatcggcacatacatcgaaatttctatgtgcttcatggtcataccattttataagttgagagttgagaatggagagttgagagtgggctgcgctgtccggctgcagagtaactctcaactctccattctcaactctcaacttattaactagccagcttcgggagatgacggcgtgagcctttagtagttctaaagaagctgttgcgctcatttcggatgaaattacactggtaagatattcttcaatggaaatcacattgatggcggttagttgttctccttcgatgataatctttaattcccctttgaatttctggacttctttgcgttcccaatggaagttgattccgatggtcacatctttcagttcaaagaaagcatgtgcattttgtggaggaatgaaggataattcgtcgtactctttcccttgccaatgaatcttcccatcctgataaataactttctgtgtcccggaaatttccgttccgacagaagaactaaatttcactgggaaagagaattcaatctctttcccagaaagaatgccaactgctatttgaggctctgtcataaggcggctttaatgcgttctattatttcttgtagcttttctttagatatcgatacttcccgatagatatcatatactttttcaggagtcagtttctccatatcctcttcacgtactatagggaatatgccgttcatttcagcaatagcaggactgatgagaatttgttcgtctccttttgcgtaatagcagtcgggacgatgtttgctgcgtaagaagataatacaattgtaagggtgttcggccactgactcaaattgatcgtcgtagttctttccaaaatcctctttggtgcgttccaaaccataccaggcaagaatattcatcattggttcttttccgttattattggcagctaagatgtcgtaaatcagatgaaaggttttcgacattgttttcttatttttcgcctgaatcctgatgaaactgtacgggaaattttcataactaatttgcaccttgtcgttatctattaaatctatgtgatcgtaatatgatccctgcatactttcctctttactgcaagcttgaaaatgggcatgatcgggagcggaagctccacattccggtccattatacataagaaagtattctctcattatgtcggtgaattctatcatatctttaaaacgcccgactatggattgcgacttgtgttccttatctacaattgtaaagtggtgtttaaatatgggatagggattaaccagtatctgataattcctataactgatgaactcttgttcctgcggtcggtttgtttggcagaggaagcaaggccgtgagtgaatggaggcaatatctgtctgtgcggtagctgaaagaatacgtttcggattaaggaataggttcgcacctaaaccgtcattaccaaaccatttggatatttcttttgttcgtgaccgatactgttccaatgcttggtaattctctttggctagtttccaagaaagagtttgcttttggaataactgttcgattttttgctgaatattctctaatgtcgtttcttgttgcaggatgcgctgttccaattcccacgtacgaagccggtctttatatagattattctggttgattttctcaacaggcagtgcagcatccgagttgccttcccaacggcggcaaaggtaaatcacgtcgtatattctgcctatctgataatcgtgtgaaattttcaatccaagggcataatcttctccatagcttgtgttcgggactttgatttcccgaagaatgggcgtgtagaatgcacggggagctcccaggccgttgatacgtaatgcattatttcgtccgttgtcgggcgtccattccttatgatcgatgatgccgggggcaatttcctgcatatcaaagttagtcatcatataagtgccgattaccattgcacatttctgtttatagaaagtatcaatgatgatttgcaggctatgttcgtctttatacacgtcatcgctatcaagctggacggcaaactttccgcatttctcgtgatggatacctatgttccaacatccgcctataccgaggtcatctctttcgggaatgacgtgaatcagccgcttgtccgaactaagttcatggagaacttcactggtcccgtctgtcgaatgattgtcgatgacaatgacattgaacggaaaggtcgtttgctggttcagtgccgagcgtacggcatctttgactgtgcgaatacggttgcgtacgggtataatgacagaagcttcatattcaaaagtgtgggaagaaaagtctacgggacggaagataggataaagatatccgccaatttccttcaaatggttggtgcatgcctgttccatttcaatctgtacctgacggtttttagggtctacataatcgaactgcttctcaccgcttttccgcttgtcactttctacttcggtatatagatattcgttgatgtgtaccagtttgctcttttgggatattttgagtctcaaatcatacaagcctgcatattgatattcctcttccgtattttctataacttccttgaatacgttggcattgaacagtaaaaccgagccgaaattgaagtcgtcacgcaggctgccgaattggtaatcaatgaccggagcaggtttttgcacactgtccatctgttggtaatggtctgcatataccatgccagcttgggtcattcccattatttgaaccattctttcaagagcgaacatgcctatttttagtgcagtgtgtttggtatagagcaaggtatatgttttatcagaatgttctgcaatagctcgcatcgcttgtgtagactgcattttctctacagagatgagttcgcatccgggaatacagacattggtaattggcgatgccaataaataaattttgtctaccagcgtcgatgcacgtaactccttaactgtttgcacagtttcttccaactggctgaaaggaagaaaacagttgattgttgttttcattattttacttcttgttgtgtagtatgagttgtgtaagatgtttcttatatatttatcataaacttgtttactttgctacaaatgtagggaatttatcatagatatatatactcttacatattttttattccaggagttccgccggtcgtatgtttagaggaacgccaattcttgttgagtgaaggtagttccggtgatttcttttcgagtgaaatgccgatagttttggatttgtcggtatcgtgcattccgtcccagaaacgacaagtgtcaaatgtatgtcctttcccagtttttggggtgctggacagtgcgagatagcctccttcattatcaagtgccgggaatttggatatttctattaggttctctctattgacattgtgtttttgaataatcttgtcgagatatttagaaaagcaaagatatcctttggatgcaatgatcaggggttgggatggagattcattttgtaacgtagtggtactgtacactttgccgtcttcatgcatcttatatagaaaaagctgtggcaacacaatagtctgttcagtcggattatagagctctatgtattcggcgccgtctgtggcattatcatacattatctcattaaagaggagcatacctctcacattttccggtagctcggtaatatctggctcttcggaatccggtttgtcgggagtattgtcggggtcggtcgttgtctctacaccgttggataatcgtacatgatggaatgtgaaggctttacagcgggttttggtgtagacacaataaattcccgaacaaacggaactctgtatgccggtatctttcacttgcttttccaatgtatatccgtcttcggattccaatcgtgtccaaaaagtccaatacccattgttatcgcattctacttttatgtataattggggggagttattacccttcatcacttcccgacccgaagccagcagcttgggctggtctccattctgacgataaagtgtcacattgtcttttgctcctcctatttgtataaaatacccgtttaggctaccggaaagggtgttggaagaagaggtcagataaaaacgtgcatagttattggcggatggattgaatgtaaggtgaactccaaactcccagcgggtattctttactgacgtggacggtatggtgacataggctgttccactatcttctgccggatcattcagatggactccttctttagaattgatagtgaatttatctgtttctccttcccaagaaagttcggaagtagccgtatcttctccttctgaatcttcttcatcatcggcaggaagtgaacaattgtagaatatagaaatgaacagacctaaaagtgtaaacactttgtaaattctcatacggtttaattcttagatgataattaatgtttgaaccgtatttgtttgtgtataacgcagaggcaattgcggcttaaattctattttgtgaatgcaaaggtatataaaaagtccggtttcaagggcgaaaccggacttttctttcttaaatctttatgatttagacattctttactttaatcagatactctgcgatctgcactgcgttcagtgctgcacctttcttgatttggtcacctacaatccagaaagtcaatccgttttcattcgtcaggtctttgcggatgcgtcccacataaaccggatctttcccagccaggaataacggcatcgggtactctttttccgcaggattatcctgaagcaccagtccgtctcccttagcgaatgcttcgcgggcttcttcgatagaaatagggcgttcggtttctacccagatactttcagagtgagcacgtagtgcaggaacacgtacgcaagtcgcgctgactttaatatctgaatgcatgattttacgtgtttcgttatacatcttcatctcttctttcgtataaccgttttctgtgaacacgtcgatctgcggtatgaggttgaaagccaattgatatgcaaacttttctactgtaacaggttcatttgccaatacttggcgatattgctcgtacaattcgtccatagcggcagcaccggcaccgctggctgcctgataggtagatacgtgcacggtttttatatgagaaagctgttcgatggctttcagtgcgacaaccatttggattgttgtacagttggggttggcaatgacaccgcgtggacgctccaatgcgtcttcggcatttacctcaggcactaccaaaggtacatccgcatccatacggaaagcgctggagttgtcgatcatcacagcaccgtatttagtgatggtcttttcgaactctttggatgttcctgcaccggcagaagtgaaagcaatgtctacccctttaaagtcatcgttgtgttgtaagagtttcacctcgatctgtttaccgcggaaagtataagttgttccggcactacgtttagaaccgaacaaaactaactcatccaacgggaagtttctctcatcgagcacgcgcaggaattcctgtcccacggctccgcttacgccaacaatagctactttcatctttttcttttgttaaatgtgaatactgtatttccctttctatactgtctaataggaaagattagactgcaaaattataacaatttgccatataaaccgcatttttgtcgaaaaaatattatttgaatctatctacttatgaattggaggtatgcgaacttttttgttcctttgtagttgaattcctaaaaccacagtctatgaacctgtttgatctcaatttaacgttgccaatttctgatccgacttgggtgttttttttggtactgattattattctttttgctccgatgattctcggacggcttcatatacctcatattataggcatgattctggcgggggtactgattggagagcatggctttcatgtgctcgaccgtgatagcagttttgaactgttcggtaaagtcgggctttattatattatgtttctcgccggtcttgagatggatatggaggattttaagaagaaccggacgaaaagctttgtgtttggctggctcacctttctgattcctatgggattgggtatatggagcagtatgagtctgttgggctatggttttctcactgccgtactgttggcaagtatgtacgcttcccatacgttgattgcttatcctattatcagtcgttacggattgtcacgtctgcgcagtgtcaatataactattggcggtactgctgttaccgttacccttgctttgattattctagctgttgtaggtggaatgtttaagggaactgtggatggttggttttgggcgttcctggttgctaaagtcgcttttctcggatttttgattgttttctttttcccccgtatcggtcgctggttcttccgaaagtatgacgatagcgtgatgcagtttgtgtttgtgttggcaatggtctttctgggtggtggattaatggaatttgtcggaatggagggtatcttgggagcctttcttgccggattggtcttaaatcggctgattcctcacgtttctccgttgatgaaccgtttggagtttgtaggaaatgcgttgtttataccttatttcctgattggtgtcggaatgattattgatgtaagaagtctgttcaccggtggggaagcgttgaaggtggcaattgtaatgacagtggtagctactttcagcaagtggctggcagcatgggctacgcagaagatttatcggatgcagccgaatgaacggagtatgatattcggtctgagtaatgcacaggcagcagccacattggcggcagtattgatcggacacgaaatcattatggagaatggagaacgtttgctgaatgatgatgtgctgaacggtaccgtagtgatgattctctttacttgtgtcatcagttctttggtgacggagcgttctgcccgccgttttgctttagacgaaaatgtgcagtcggaaaaagaaggggtgaaaaataataatgaacagatattgattccggttgccaacccggatacgattgaagacctcatcaatttggcattggtcataaaggatgccaaacagaaaaatgggttgatagcattgaatgtaatcaatgataataatagctcggaaaagaaagaattacagggaaaacgtaatctggaaaaagctgcgatgattgctgcggctgccgatgttcctgtcactatggtcagtcgttatgatctgaatattgcttcgggaattatacatacgataaaagagtatgaggctacggatgtggtgatcggtttgcaccggaaagctaatatcgtggattcttttttcgggcatttggcggaaagtctgctgaaaggtacgcatcgcgaggtgatgatcgcaaaattcctgatgccggtgaataccttacgccggattaatattgccgttcctccaaaggcggaatatgagaccggctttgcaaagtgggtggagcatttctgccgtatgggaagcattctaggatgtcgtgtacatttcttctcgaatgaacggacattgatgaggcttcagcaacttgtgaaaaagaaatatgtaggtactccgaccgagttttctacattagatgagtgggatgatcttttgctattaacgggacaggttaactatgaccatctgttggttgttatttccgcccgtcggggatctatctcttatgatccttcttttgatcgtttgccgtcacagttgggcaaatattttgcaaataatagtttgattattttatatcccgaccaattcggtgaaccgcaagagatcgtgtctttctccgatcctcgcgggcataatgagtctcagcattatgagaaggtcggtaaatggttctataaatggttcaagaaaagctgatggaaagagacgactggcaacaaagaacggaacttcttttgggagaagagaagatgaatcgtatccggaactctcacgtattggtcgtggggctgggtggagtgggagcttatgcggcagaaatgatttgtcgtgcaggagtcggacgaatgacgattgtagatgccgatacggtgcagccgactaacctgaaccgtcagttacctgcattgcattccactttggggatgtcgaaggcggaagtgctggctacccggtataaagatataaaccccgatatcgacctgaccgttttacctgtttatctgaaagatgaaaatataccggagctattggatgccggtaaatatgatttcatagtggacgctatcgatacaatcagtccgaagtgtttcttgatttatgaagcgatgaaacggcggatcaggattgtttccagtatgggagcaggggcaaaaagtgacattacgcaggtacggtttgccgatctttgggatacttatcattgcggattgagcaaagcggtgcggaaacggttacagaaaatggggatgaaacgtacactcccggttgtgttcagtaccgaacaggctgatgcaaaggcggtgttgctcacagatgacgaacagaacaagaaatcgacttgcggaacggtcagttatatgcctgctgtgtttggatgttatctggcggaatatgtcattaaaagattataaaagctattatgataaaattagaaggaataacgaagaacttcggttcattacaagtactgaaaggcattgatcttgaaatcaataagagtgaggttgtcagcattgtaggtcctagtggagcgggtaagacaacgctgctgcaaattatgggtactttggatgaaccggataccggtctggtacaaatcgacggaactgtggtcagccggatgaaggagaaagagttgtctgcattccgtaacaagaatattggttttgttttccagttccaccaacttcttccggagtttacggcattagagaatgtgatgattcctgcattcattgcaggggtatccttaaaggaggcaaacgatcgtgccatgaagattctggattttatggggctggcagaccgtgcctcccataaaccgaatgaattgtcgggaggagagaaacaacgggtggctgtggcgagagccttaatcaacgatcctgccgtaattctggcggacgagccttccggaagtctagatactcaaaataaagaagatttacaccgtctgttctttgatttgcgagatcggctgggtcagactttcgtgattgttacccatgatgagggacttgctaaaataactgaccgaacggttcatatggtagatggtatgattaaaaaagattaataaaggaacctaacttctagaaatgtataccaaaaaggtggaatcttgcaaggattctatcttttagttatatatttatagtcgcttctctacagaagtctgtgaagatgatagtagagtgtttgttttgtttgtgtgtgatgcattcttgtctggtgtgataggaatgcatctttcttttaattaatcataacagatatagggctctatccgttcaaggtcggcagaagtgaattcttcatagagtgataattgtttcaaactctttaatcttcctttctttttccggtgctctacaatcactcttgcttgataataattgatatacggatgatgcatcattcgttccacgcttgccttgttcaaattgatacggcgtatctcatcgggggcgattgaaaaccatggacgaagcttttctacctttagatgaatctcttgcaattgttctattctataaaaagctcccagcttcttacggtaatttacaatcatccgggcgatactactcccgattcccggaatctttttaagttcggttgtgtctgcttggttgaggctgataacagtaccgggctgatacttgaataccgtgtcttttcgtatgttttgtatggtgagcagtcgcactgtatctttggagcggagcttttctgcaatccggatgtagggaagaagagtctgatattgttcttccttcagcccatatattttccggaaatcctccggatgtcggaatatcccctgtcttcttcgatagttcagaatattctttgccatccatgccggtaggccgagagagaggaaagtcatggaatcagcagtgttcggatcgaatgcgaaaggagtgatttctttccttacggatggtcgggaagtcggattcttcgactttttgtgagattccacttcttcgagagaagcgatgaactcattatattctttctgaaatatctcttgtttcaaggtgtctacctctttcggacgattgaaaagagggaagagattggggagtaagagtactcctaaaataaggacgacaaggacgataatgccttgtcgttcggttttagtgaaataaaaaaagtctttccacattatagtttgatgaatcctagctcattgatgaatattaatgtaatagcgattggtgcgatatattttaatataaagacaatcagccgatatacgggaattctaagtgtgccgttgttggtaatttccgaccataccactttcttgtcgagataccatccggtaaagagagaaatgcacagtccgccgaggggaagcatgagtttggctgtgacaaagtcgaataggtcgaacatccccaagccaaaaacagtgaattcttttgttactcccaatgataatgaacagaatactccgaagaatatgcatccgccggtcacaagttttgccgctttcccacgggagaatttgaattcttcatgcagataggctgtcaccacttcgtgtagggaaatagtggaagtcaatgctgccattgccagcaatgcgtagaacattacagagaatatatatgccaatataggtaccccgctaaatgcttgttggaatacgttcggtagcgtaatgaaaataagactaggaccggatcccggttggattccgacggaaaaggcggccgggaaaattataaatccggctagtattgccacgaaggtatcgataatacctacgctgaaagccgttttagttaggtttgtctctttactgaagtaggaagcgtatgtgcaaaggcaacccattcccaaactaagggaaaagaaggcttgtcccatagcactcagaaatacattgccgtccactttgctgaagtccggtttcaaaagaaactcgataccggcaccggcgcctggcaatgaaacagagcagcctaccaatataagaataatgatgaaaagtgtgggcatcattatcttggaagacttttcaatccctttttccaccccttttacaatgatgaagtgggtaattaacaagaaggaaaccaaccagaccaccggtcgccagggattgctggaaaactgttggaaagaagtgatgaactcttcgggagtttttcccgcaaaaccatttgaagctgcttcaaatatatattcaagtgtccatccggctactaccgaataataactgaggatcagaaaacctgccaatacacccatacggcctacccaacgccaatgtgtaccgggtgctaatttctgataagctcctgctgtgttggctcttgaacgacggcctatcaggaattcggcaatcataatgggaagccccaaaagcaagacacagcctaagtagatcaatataaaggcggctcccccatgatttcctgtctcgtaagggaatctccatatattccccagccctactgccgagcctgcagaggcaagtataacgcctaatttactaccgaagttcgctctatcattttttgtcataaatcttgttttatcttacaaatcgttataaaatatacgtattaaagtgcaaatatagaaaatgatacttatatttgtgctgaaactgtaattttatttagatatgctatcttatattaagaaatatcctatctcgctttttattattctgacagtgatttacctgtcattctttaaaccgcctaagacggatttgaatgaaatacctaacttggacaaattagtgcatatttgtatgtatttcggtatgtcggggatgttatggctggaattcttgcgtgcacatcgtagagataatactccgatgtggcacgcgtggttaggcgcatttctctgtcccatcctctttagtggcgcggtggagctgatgcaagaatactgtaccacctatcgtggaggagactggctggactttgcagccaacagtacaggggctattctggccagcctggtagcctattatggggtaagactgagaatgaaaaataggaaatgaagaattttacaaatgttctaccgttgaactaagtttgattccgttggaacctttgatgagaatcgtatagcctttgggcttttgggtttccagttccttgataacttcctgtacgtttgcgtaggtcttgaagttatgctgtgttgctgcaaactgttctccaacgagccatacttgctcgaagttactatctttaatgtaatccacaattttctggtgttcgatgttgctttcggcacctagttcgcgcatatctcccaatagtagcatcttgtggggaactgccatattgcggaagttctgcagagcagccatcatgctagtcggattggcattgtatgcatcgataatcaacgtattgtctgttgtctgtttgagctgcgaacggttgttttgtggagtatatccggctagggcctcatcgatcttttgcatttctactccgaaaaaatgtccgatagttatggcggctaaagcattggggaaattatattctccgattagctgtgtctgtatccggtggatttcgttcccgtttcccgctttccattcgaaagccagataaggtgaattatcggtgatacgtccattgatatacaggccatcttgggttccgtaataaatccggtctagctcttcggacatattcatcagatagggattatcgtggtggatgaagatggtagaattttctttcttgcgaaggaaatcgtatagctctcctttggttttgatgactccttcaaacgagccgaagccttccagatgggctttgcccacattcgttatgatgccgtaatcaggttctgctatttcgcagagaaacttgatttctcccggatgattggctcccatctcaatcacagcgaggtcgtgctccggttttagacggagcagagtagtcggcacgccaatatgattgttcagatttcctagcgtatagagtacgttatgtgcctgactaagtacggtagatatcaattcctttgtagtcgtttttccgtttgttccggtaataccgattactttggtaccgagttggcgacgatggtagttggcaagttgctgcattgtttgcagacaattgtccacaagtatatagcgttggtcgccttctacggcatattcgccttcatcaataattgcatacgcgcatccggagtccaatgcaaacttggcaaatgcattaccgttgaacgactcacctttcaaggcgataaacaaagaaccgtccgggcagttccggctatcagtagttactgattggcattccaggaaaatctggtaaagagcagaaagtttcataacctgatcttttatttaaaaacgctgcaaagataggttattctttcggattatttctctacatttgcaacaatctaaaaggaatacgatcaatgataaagccaatgtctcctatttatataaatgtaaaagggcggttgcttgacctcgctacgccgcaagtaatggggattctgaatgtaactcccgattctttttattccggtagccggatgcagactgaagaagaaataaccgcccgtgcccggcagattctggatgagggcgcttctattattgatataggcgcttattcttcgcgtccgaatgccgaacatatctctgctgaagaagagatgcgccgacttcgtaccgggttggaaatcctgaaccggaatcatccggaggctatcatttccgtagatacatttcgggcggaggtggcagaacgctgtgtgaaggaatacggagttgctattatcaatgatatagcagccggtgagatggatgacaggatgtttgcaacagtagccgaattgggagtaccttatattatgatgcatatgcagggaactccgcaaagtatgcagaaagaacctcattatgagaatctgataaaggaagttttcttgtattttgcccgtaaagtgcagcaacttcgtgatttgggagtgaaggatataatcctcgatccgggattcgggttcggtaagacactggagcataattatgaactgatggcacatctggaggagttccacatctttgaacttccggtactagtgggagtttcccgcaaatctatgatttataaactgttaggaggaactccgcaagactcattgaacgggacaaccatattggatactgtggcgttaatgaaaggagtgcatattttgcgtgtacatgatgtgcgtgaagctgtggaaacagttcggatcgttgaaaaaataaaaaaggagagccatgttttttgatattggaataaaagattttatagatgtcctgctggtcgcatttctgttgtattacacgtacaaactgatgaaagcttccggttccattaaggtttttaccggtattcttgtttttatcttgatttggctggtggtgacccaggtgttggagatgaaactgcttggctctatctttgacacgttgatgagtgtcggtgtgatagctttgattgttctttttcaggatgagatacgtcgcttcttgttgactttaggctctcatcgccatgtcagtgcattgtcacggttgtttaacggctcgaagaaggaatcgttgaagcatgatgatattatgcctgttgtaatggcttgtctgagtatgggcaaacagaaagtcggcgcattgattgtgattgagcataatactcctttagatgagatagtccgtacaggggaggtgattgatgcggcaatcaaccaacggctgattgaaaatatcttcttcaagaatagtccattgcatgacggggcgatggttatcagtaaaaagcgtattgaagcggcgggatgtattctgccggtttcccatgatttgaatattccgaaagaacttggtttgcgtcaccgtgcggctatgggaatctcccagcagtcggatgcccatgctatcattgtttccgaagagaccggagctatctccgtagcttatcgcggacagttctatcttcgcttgaatgcggaggaactggaaagtctgttgacgaaagaaaattgaatttgattgctagtaggctgctagtaggctatttttgctttatttccacccctttttgaatgataattatgccttttcttttaggtgaatcgcctacctttgccgtatactattaaaattctatttttgaataaaccatgaaaaacagattaattgcgttactggtactttttacagttacttttttcgttagtagtgcacaggcacaaaccactgcccgtaagtttgaggcaggcaagaacacttttctgctggacggaaaaccatttgtagtgaaggctgccgagttgcattatacccgtatcccgcaagcttattgggaacaccgtatagagatgtgcaaagcgttgggaatgaatacgatttgtatttatattttctggaatatccatgaacaggaagaaggtaaattcgactttaccgggcagaatgacattgctgctttctgtcgtgcagcacagaaacatggtatgtatgtcattgtccgtcccggtccgtatgtctgtgcggaatgggagatgggaggacttccctggtggttgctgaagaagagggatatagctttgcgtacactcgatccttattatatggaacgggtcggtatctttatgaaagaagtgggcaagcagctggctccgttgcaggtaaataaaggtggaaatatcataatggttcaggtagagaatgaatacggttcttatggaatcaacaaaccatatgtatctgccgtccgtgatttagtgcgtgagtctggctttaccgatgtgcctttgtttcaatgtgactggagcagtaacttcacgaataatgcactcgacgatttgatctggactgtgaatttcggtacgggagccaatatcgaccagcaatttaagaaattgaaagagcttcgccccgaaactccgttgatgtgtagtgaattttggagcggatggttcgaccattggggacggaaacatgagacacgtcctgcgaaagatatggtgcagggcattaaggatatgctcgaccggaacatctctttcagtctgtatatgactcacggaggaacgactttcggacattggggaggtgcgaacaacccggcttattccgccatgtgcagctcatacgattatgatgctcctatcagtgaggcgggatggactaccgagaagtatttcttgcttcgtgatttattgaagaactatcttcctgcaggtgctgcattgccggaagttcctgccgctctgcccgtaatagagattcctgaattccattttacgaaagtggctccgctcttctctaatttgccggaagcgaaacattcaacggatatccaaccgatggaacagtttaatcagggatggggaacgattctgtatcgtacaaccttgccggaggctgttgctgtcggtacggtcctcaagattacggaggtacatgactgggcgcaggtttatgccgatggtaagctgttggcgcgtctggatcgtcgtaagggagagttcacaacaacgctgcctatattaaagaaaggtacgcaactggatattctcatagaagcgatggggcgtgtcaactttgacaaatccattcacgaccgcaaaggaatcacagaaaaggtggaacttatttcaggaaatcagacaaaggaattgaaaaactggacagtgtataacttcccggtagattattcctttattaaagataagaaatataatgaaaccaaacagttgccgactatgccggcctattataaaggtacttttaaactggacaaagtaggagatactttcctggatatgagtacatggggtaaaggtatggtttgggtgaacggtcatgcgatgggacgtttttgggaaatcggtccgcaacaaacactctttatgccgggttgctggctgaaaaaaggagagaatgagattctcgtccttgatttgaaaggtcctgccaaagcttctatcaagggtttgaagaagccaattctcgatgtgcttcgtgaaaaagcacccgaaacacaccgtaaggatggcgagaagctgaaacttacaggtgagaaagcagtatgcgaaggagctttcactccaggtaacggctggcaggaagtacgatttgatactccggtgaaaggacgctatttctgtctggaagcactttctccgcaagcgaatgataatatcgcagcggtggcggagtttgatgtattgggagccgacggtaaacctgtgtcccgcgagcactggaagatccgttatgccgacagtgaggaaacacgtagcggtaaccgtacggccgacaagatcttcgacctgcaggagtcgactttctggatgacagtagacaatgttgcctatcctcatcatttagtgatcgacttgagtaaagtggaaacggtaaccggtttccgctatctgccccgtgccgaaaagaactatccgggtatgattcgtgaatatcgtgtatatgtaagacctgtggatttcaactattagagaatatcaaatgaatatgaagaaatatatcaccctcttggcactccttttcataggagtgctgaccggctacagccagcaatccgcttatctgtttgtttattttacaggcaatcgtatgagtgaagaagccgtccggatggctgtcagccttgacggatacaattataaagccttgaacgggaatcagccggtacttgattcccgtgtgattagttcaacaggtggagtacgtgatcctcacatccttcgttctgaagatggaaagactttctatatggtcgttaccgatatggtatgtggaaacggatgggattctaaccgtgccatggtgttgttgaaatcgaaggacttggttcactggacttctaatgttgtaaacatccaaaagaagtatcccaatcaagagaatctgaaacgggtatgggcaccgcagacggtttatgataaagaagccgggaaatatatgatatattggtcaatgaaacatggcaacggtgcggatatcatttattatgcgtatgccaacaaggattttacggatatagaaggtgaaccgaaacctctgtttctaccggcaaacggaaagtcatgtatcgacggggatattatttataaaaacggactttaccatctgttctataaaacggaaggcaatggaaatggaatcaaaaaggcgaccactccttctttgacttccggacagtggaaggaatcggatgattataaacaacagaccaaagaagccgtagaaggttcgggtattttccctttgatagggacggacaaatatatcctgatgtacgatgtatatatgaaaggtaaataccagtttacggaaagtatcgacctcgaaaactttaaagtaatagaccatgctgtgagtatggacttccatccgcgtcacggtactgtgatacccattaccgggaaagagctgaaacgcttgttcaaagcgtatggtaagccggaaggtctttaagcttcggtaggttgataatcttaatgcaatagataccatgagaaaattattcctgtttttagttgtcttgttttggtcgtttcagcaagtcactttagctgcaatcaaagaaatgacgagtacccccgattcggtttatctcttttccttcgctacttccggagacgacggacgtagcgggcttcgttttgcctggagcatggataaggaaaactggtttgaagtcggccggaactacggatatctccggtgtgattatagccgttggggatcacagaagaaaatgctcgacccttatttgaaacagtcgcccgctggcgaatgggtttgtacctggaaattgaatgatcgtgatggatacggtcaggccacttctaaagacttgataaactggaccagccagaaatatccccgtactacttccgattttgacggaacaagagtgaaagccgttgttgccggagaggagcagaaaggaactatcaaccgggtagcgtggactttggtagatggattaaataagaattatggctggaatcaatatcggaactcattatatgaagaacgtccggtgcaggatggagaacgttttgccggtttgaagcctgtaaaggcaacggtcaccgtacagcctgaacgtgccaaagctatcagcgatgtcttgttgggtgctttctttgaagatattaattattcggcagacggaggactctatgcagagctgatccagaaccgtgatttcgaatacgacccttcagacagggagggggatgagaactggaatagtactcattcttggacactgaaaggagataaaaccactttcaccattaacactaccaatcctattcatgccaataatccgcactatgccgtattgaatgtagaacgaccgggagccgcgttagaaaatacaggctttgatggtatcgcgctgaatgtcggagagaaatatgatttttccatatttgcgagggttccgcagggtaaatcaaataaattgcaggttcgtctggtagatggaaaaggaaatgtgtgtggagaaacttctctaacagtgtcttcccgccaatggaaaacgtataaagcagtgattgcggccaaagcaaccgcagatactcgcctcgaaatcattccgcaatctgctggagaattgaatctggatatggtttccctgtttccgcagcatacatttaaaggacgcaagaacggactccgcaaggatctggctcaagtgttagctgacattcatccccgtttcatccgttttcccggtggctgtgtggctcatggtgatggtctgaagaatatctatcaatggaaaaacacggtcggaccgttagaagcaagaaaggcgcaacgtaacctttggggctatcatcaaagcatgggactgggatattttgaatatttccaattctgcgaagatattggcgcagaaccgcttccggtattggcagccggtgttccttgccagaactctgcctgtcacggcaacttgggaggagggcagcaaggcggcattccgatgagcgaaatgggagcttacattcaggatattcttgatctgatagaatgggcaaacggtgatgcgaagaagacaaagtggggaaaggtgcgcgctgaagcaggccatccgaaacctttcaatctgaaatatatcggcatcggcaacgaggaccttatcaccgatatcttcaaagaacgcttcacgatgatattcaatgccatcaaagaaaaatatccggaaatgatagttgtaggtacggtaggaccgttcaatgagggcacggattatgtggaaggatggaagctggcggacaaactaggtgttccgatggtggacgaacattattatcagtctccgggatggttcctgcataatcaggacttctacgacaagtatgaccgtagcaagaaaacaagagtatatctcggagaatatgccactcacataccgggacggaaagcaaatattgaaacagctttgacggaagctctttatctggcctctttggaacggaatggggatgtagtacacatgacttcctatgctcctcttctcgccaaagaaagacatacccaatggaatccggatttgatttacttcaataatcgggaagtgaagcctactaccggttattatgttcagaagctttacggacagaatgccggaaacgaatatttgccgtccaaaattgttttagacaataaagacgataaggtgaggaagcgttttgcttcttccattgttcgtgattcggtaagcggggacgtgattgtgaaactggtgaatctgcttccggtggaggtaaatacgaatgtggatctctccggaatcggtgcggtacaaccttctgcgaagagaaccgtattgaccggtaagccgacggatactccgttacctgttgaagacagaatacaaattgcagagaagtttgattgcaatctgcccgcctattcttttacggtgatccggatacagaaggcgaattaatggaaagtaaactggcatatctctaataccatagtaatgattatgaagaaactgataggaacagtattggcaagtttctgcctgacctctctgatggcgcaagatatagtgatggacggaccggatgggaaattacaattagcggtatttgcttcttcggaggcgaatcctgtttattctattgtttataatggaaagacaatgctggagaaatctcctctgggaatgaccaccaatattggtgactttacaaaggggatgaaactgacaggacattccgttactccgattgataccatttatggtcagaaccgtatcaagacattacaaatacactatcgggcgaacgagttgatttgtaattttgaaaatcccaaaggacagaaaatgaatgtgaccttccgtattggcaacaatgacgtagcgtttcgatatagtttgcctcgccagaatggaaaaggaagtgtgacggtgactgccgaagaaaccggtttccgtttaccacagcagactactaccttcttatgtccgcaaagcgatgccatgataggttggaaacgaacaaaacccagttacgaggaagaatataaagcggatgcgcctatgagtgagcgttcgcaatacggacatggctacacattcccttgcctgttccgtatcggaactgatggttgggtattgatcagtgagacgggagtagacagccgttattgcggttcacatttgagtgacgtgactgaaggtaatttatatacaatagctttcccgatggcggaagaaaataatggtaacggaacttctgctccggcgtttgcccttcccggtgccactccttggcgtaccataactgttggcgagaccttgaaaccgattgtggaaacgactgtcacttgggatgtggtacatcctctttatgaaacgaagcatgattatcgtttcggacgcggcacatggagttggattctctggcaggatgacagtatcaactacaacgatcaggtccgctatatagattttgcttccgcaatgggttatgaatatgtattgattgacaattggtgggatacaagaatcggtcgtgaccgcatgaaatctctagtggaatatgcgcggagcaaaggagtggaaatcttcttgtggtatagctcttccggctattggaatgatattgagcagggaccagtgaatcacatggacaatgccattatccgcaaacgtgaaatgaaatggttgcagagtcttggagtgaaaggaatcaaagttgatttctttggtggagacaaacaagagacgatgcgtctgtatgaagatatcttgagtgatgctgacgatcatggtttgatggtaatcttccacggctgtaccatccctcgcggatgggaacgtatgtaccccaactatgtaggcagcgaggctgtgctcgcatccgagaatatggttttcaaccagcacttttgtgatgaggaagctttcaatacttgcctgcatccgtttatccgcaatacggtaggttgcatggaattcggcggttgttttctgaacaaacggctgaaccgcaacaatgacggaggaactatccgccgtactactgatatatttcaattagccactacggtactgttccagaatccggtacagaactttgcgcttgcccctaacaacttgaaagatgtttctcctgtttgtatggactatatgaaagcggttcctaccacatgggatgagacacgtttcattgacgggtatccgggaaaatatgtagtcttggcacgccgtcacggtgacacctggtatctggcggctgtgaatgccggaaaagaaacactaaagttgaaattggatttggaaatgtttgccggaaaaaccgtctctctgtataaggatgataaaaaaggagaacctcaacttgtaccgttgaaggtaaaagagaatggtaaagtgcagctggaaatccttccacagggaggtgttgtattggtgaattgaattgttacgggatcataagggaaatgattctccgacaaaagtttggtagaatcaatatttatagcgtaatttgtgtagcataaaaagtgctacaataattacgctataaataattgcttgaatatgagtgatgtaaataatccttttttgatttatgcctatgctggtcctaagtatttctgtgatcggatagaagaaacggaacatttgatatccgctttacggaatggaagaaatgtgaccttaatgagtcctcgccgtatgggtaagaccggattaatacagaacgtttttcatcagatacgacgggattatccggaggcagcctgtttttacatggatattttttccacgacatgtctggatgattttatcattcagttcgggcagactgtgattggtaaattagataatttatcgcagaagacgttggcggcaatcagtggcttttttaaaaattgtcgtttagtgtttttccccgatgtcttaacgggagtgccacaagcgactcttgattttcaaccttcccaggcacaagcgacattaaaggagatttttgattatctggaacattcgggaaaggaatgttatatcgctattgatgagtttcagcagatcactgaatatccggaaaaaggggtagaaggcttgttgcgctcttacattcaatttttacctcatgtacattttattttttcaggaagtaaacaacatctgatggcagaaatgttcggttcagcgaaacgtcctttttaccggagtacggaaaaaatgaatctgacatccatccctttagaagattattctctttttgccatacgttggatgcaggccggaggaaaagatttgagtgatgaattttttcagatgatttatcaacgttttaatgggcatacatggtatatacagtatgtgctgaaccgactttatgaacaaaaggagtctgtcttaaatgaaaccatctttgagaaatgtttgacggatatagttcgctctgagatggatgaatatcagcgtttatatggtatgctgaccgagaaccagtctactttgttgcgtgctatcgctcgggaacgatttgttgcagctattaatagctctatatttattaagaagtatggattgaagggtccgagtagtattaatgcggctcttaagtttctggttaataaagaatatgtgtttaaggcagaagagggatattgtgtatacgaccgttttatggagttgtggttacagacattaccttacgccggtatactaaaataatcatttcgaggaaatatccttcacccgctaacgccgatggatagggcgtcgtgaagggtgaaggatattggtggttatgattatattttaagattacaaagatgattgttctcaatcgtttaacacccttcactttgtctacgcgaggaaatcgtttatctttatgttgtgcatacttaaatatcatcccattatgatttactccataggattacagaactttgagagtctgataaatgacggttatatgtatgtagacaagacagcgttagtctatcaaatggctactaccggacgttattattttcttagccgtccccgacgttttgggaagagcttgcttctttctatgctggaagcttatctgagcggtaaaaaggaacttttcaagggacttgccatcgagaagttggaacataaaatgggaagaacatcctattcttcatcttgacttgaatactgccaaatatgatgcgatggatagcttgaatcatgttcttgatgacagtctcaaaaaatgggaagaaatatacggcacctttcctacagaggtgacttttgctttacgcttaaagggaatcgtaaaacgtgcttacgaaaagactatcatcgtgtagttattcttgtggatgaatacgataagcctatgctgcaagctattggtaacgaggtgttacagacagaatatggtagcacgctgaaagctttctactctgtactcaaaacacaagaccgctatatcaaacttgctttcttgacaggtgtgacgaaattcggcaaggtgagtgtgttcaatgatttgaataacttgaatgatatctctatggacgaccgctacatcaatatttgcggtatcacagatagagaacttcacgaatactttgataatgatgtggcactgttaggtgaaagaaatgggttgacaaaggaggaatgttacaccaaactgaaggaacagtacgatggttatcattttgactgcaaaaccgaaggactttataatcctttcagcatcctcaatactttagctaaaatgaagtttgccaattattggtttgaaataggcacaccttcattccttgtttatctgatgaagaattcgaattaccagttggacaagttaaccgaagagcaagtttccggtgactttttgaatagcattgattccatgtcacgcaatcctattcctgtcatttatcagagcggatatctcacgataaaggggtataatgaagaatttgatatctaccggttgggctttcccaacaaagaggtggaaagtggtttcattaaatatctgatacctttttacacaccggaagaagaaaagacgggatttttcatcactaactttatcatggatatacgtcgtggtgctcctgaaagctttatgcagcgaatgtaatccatgtttgccgatactgactacaagataacggggaagatggaactttattttcaaaatgcgatgtatctggtgtttaaaatgttaggcttttataccgacgtaaaacgtaccactagtaatggacgtatagatattgtgttgaaaaccaaggactatatttacgtgatggaacttaaacttgatggtagtgccgacgacgctttacgtcagatagaggagaagggttatgctttgccttttgccaaagatccccgcaaattatataagataggtgttgacttctcttccgagacacgtggcattaaggagtggaaaataatccctgatgctgatgcatagcgcattatgaaaagtatagttggtcattgaaatatgcaataatggataggtggaaagtggagtaatgtcgtattattatatagtggcaatgagattcatttgcgaaaagatagccttataaaagcttttcatacgaataatggtctttttgtatccctttttgacgtaaaattggactctatttatctaagtatggagtacctttgtagacgaaaaacctaaaataatatcatgaatttgaatagacattacttactaccgttgctgatagcaatgttgttgatccctgcacaggatctatctgcgaaaaagaaaaaacaagtaaaagaaccgaccgaccgcgaactgtgggcgggagtattatatcgaatggctgaacccgtgcttagtaatatgagtgagggcaagttgcaacagaacatgctggtagagttaagcccgacatgggatggacggaataagaaagtcacttatatggagtgcttcgggcgtttaatggcaggattggcaccttggatttcattaccggatgatgatacagtggagggagctcagcgtaaacagttgcgcgaatgggcgttaaagagttatgcgcaggctgtaagtccggaaagtcccgattatctgttgtggagaaaagaggggcagacgttggtggatgcagcctatattgcagaaagtttcataagaggatatgatgccttgtgggttccgctggacagtgtgacaaaacaacgttatattaccgaatttacacaacttcgccgagtagaccctccttacactaactggttgttattctctgccacagtggaatctttcctgtgtaaggctggtgcaccgagtgatacttatcgcattgcttcggctctacgtaaagtggaagaatggtatgtgggagatggctggtattcggacggtccggattttgcttttgactattataatagtttcgttttgcaccctatgtatatagaaccgttggaaatcatgacaaatgccggtaagaacaaagtctggaatatgccggattgcgattataatcgtgcagtcaaacggatgcaacgctttggaataattctggaacggtttatttctccggaaggtacgctcccaatattcgggcgttctatcacgtaccgtacaggaactttacaacctttagcattactggcatggagagggtggctccctaaagaattaccaaatggacaagtacgtgcagctatgacggcagttatcaaacgaatgttcagtgataatcataatttcaatgaaaaaggattcctgactttaggattcaatggtaagcagccgaatatatcagattggtacacgaataatggcagcttatatatggcttcactcgcattcctcccattgggacttccggcagaacatccattttggacttcacctgccgaggattggacaagtaagaaagcctgggaggggaaagatttcccgaaagatcatgctgttcattaagatggactaactaataaagatttatatatgactagactattattatttattgtagtttgtcttggcttgctgccgatgtcggtacaagctcagaaaaacgctgcatttatccccggtgaagtttggaaagatacggacgggaatccgatcaatgcccatggtggtggacttttatatcataacggcacttactattggtatggcgaatacaagaaagggaaaaccattttgcctgactgggctacgtgggagtgttatcgtacggatgtgaccggagtaggttgttactcttctaaagacttgctgaattggaaatttgagggtattgtacttccggcagttaaagacgatccgaatcatgacctgcatccctccaaagtattggaacgtccgaaagtggtttataataagaaaacgggcaaatttgtaatgtgggcccatgtggaaagtgctgattacagtaaggcttgtgccggagtggcagtttccgattctcctgtcggtccgttcgtttatcagggaagttttcgtccgaacaatgcgatgagccgcgatcagactgtttttgtggatgatgatggacgtgcttatcagttttattcttcagaaaataatgaaacgatgtatatcagccttctgactgatgattatctgaaaccgagcggacgttttacacgcaatttcgtaaaagaatcgagagaggctccggcagtatttaaatataatggtaaatattatatgttgagttccggttgtactggctgggatcctaatatagccgagatcgcagtagccgattctattatgggaacatggaagacaatcggaaatccttgtacgggaccggatgcggataaaacgttttatgcccagagtacttatgtccagcctgttgtcggaaagaagaatgcatatattgccatgttcgaccgttggaagaagaaggatttggaagattcccgttatgtatggctgcctgtgttggtaaaagatgggaaaataactatcccttggcatgaaaaatggaacctttctatctttgacaaataaaaaataaatatgaaacggatactgctactactttgcggaataatgctcgttcccgttattgcctgttcccagcatttggttgaagtgggaaaggggtatagctgtacttcggtcaatacgacggtctttcggaataattcgctggttacacacggtgatgaacaatatatcagttattacgataacgatggctatctggtacttggaaagcggaaactggattcggaacaatggacattacatcgcacccaatatcagggaaatgtgaaggatgctcataatataattagtatgatgatagatggagaaggatacatgcacgtatcttttgaccatcacggacatccattgaattactgccggagcattgctcccggttctttggaactgggggataaaatgcccatgaccggagttgacgaaggaaatgtcacctatctggagttctatcctttatccggaggagatttattgtttgtttaccgctccggttcttcgggtcgtggaaatctggtaatgaaccgttattcgctgaaagaacacaaatggactcgtgtgcaggatatactgatcgacggagaaaataaacggaatgcctattggcagttatatgttgatgagaaagggacgattcatctttcatgggtatggcgcgagacctggcatgtggaaacaaaccatgatatttgttatgcccgttcttttgataatggggtaacttggtataagacgagtggagaacgatatgaactcccgatcaaattgtccaatgcggagtatgcctgtcgtttacctcaaaactgtgagttgattaatcagacgagcatgagtgttgatgcaggaggaaatccgtatatagctacttattggcgggaacccgatagtgatgttcctcaataccgcatcgtctggaatgacgggaagatgtggcatcaacggcagataaccgatcgccagacaccttttaccttgaagggtggaggtacgaaaatgatccctattgcccgtccgcgtattgtggtagaaggtggagaagtcttttatattttccgtgacgaagaacggggaagccgtgtgtcgatggcacatgcgactgatgtgggtacgagtaagtggacgataacggatctgacggatttttcggtggatgcctgggaaccctctcatgatacggaactttggaaaaagcagcggaaactgcatctctttgtacaacacacccgtcagggagacggtgaacgcacagcggaaattgagcctcaaatgatatatgtattggaaacgaatatggatacaaataaataaagatatgaagaaactatatgcaactcttttttctgcactctttctaggcggtgcaatctgtgcaagttgtacggataagaaggatgcttctgctgaagaagtgataaacactattcataaagtgaataattattggcagacgaatcatccggaacacggacgttctttttgggataatgccgcctatcacaccggaaatatggaagcttattttttgactaagcagccggagtatttggaatactcgaaagcttgggcggaacataatgaatggaaaggggcaaaatcagatcataaggaaaactggaagtacagttacggtgaaagtgatgattatgtgcttttcggtgactatcagatttgttttcagacgtatgccgatctctataatatggaaccggatacacagaaaatagcccgtgcccgcgaagtgatggaatatcagatgagtacccccaatcatgattattggtggtgggcagatggcttatatatggtcatgccggtcatgacaaagatgtataacattactaagaatccgctctatttggagaaactgcatgaatacctcgcctatgctgatagtattatgtatgatgaagaggccggactttattaccgggatggaaaatacgtgtatcctaaacacaaaagtgtgaacggcaaaaaggatttttgggcacgtggagacggctgggtattggccggattggcaaaagtcttgaaagaacttcctgaaacagataagtatcgtccggaatatatagatcgtttccgtaccctggctaagtcggttgctgcttgtcaacagccggaaggttactggacacgcagtatgctcgatccattgcatgcaccgggaccggaaaccagtggaacggctttctttacctatggtttacaatggggaatcaataacggttttctggatgctgcagaatatcagccggtggttgaaaaagcatggaaatatctctcaacagttgctttgcagcctgatggcaagattggttatgtgcaaccgattggtgagaaagcgatacccggtcaggtggtagacgcaaactcaacttcgaattttggagtaggtgcgtttctattggcagcctgtgaacgggttcgttatttgaataaataatttaattcagcatcaagctcatatatggctttaacggctgaagtattctataggttaattcactaatattcatttgtatatgtgcaccgggcagtcgctcggtgctatacatacactttcctttgcgtaagtaataatagccgttatttacaggcaattgtttgtccgataattccagttgcatttcatcttcaggaaaagctgcggcatagatttgtagcacttctttggcattgatgatacgtaccatgcctagcggatgttgaggctgtttatcttcaggaggcagtagttgaaccatacgcttgcatcctgtatgttgcttgatagcgtgcagtagactatattctacatctttgttctcagccaaaagttcattaataatgatgctctcctctcttttatagataaaggctatccctcttatttcatattcttgtctggctagaaagagtattccgttgctgacggagaggtctttcatgataacttgaaagtcctccgaagtgtgttggatgcaacaagagcgttcggacaacttcttgttaagataggaatatacctcatcttgatattctacgatgatttcaatgttgatatctttagaaggagaaggaataatctcaggtaaggctattgttttcgtagagtatttgaatactgaagcatatcccatgtgggcataatagtcgaacaaccaaggctctgctggtatcaatgtgctgaagtgtacctcattgcgtaacattcggacgaaagactgggataaaagctcgcgcatgacccctttgcttcggaaatcgggatgggtacaagcacctgaaatataagaagtttgtacggtctttccacagaaagtcatcggataaggaagcatctgaagtgccgaaactaccttgtcgccattttggataacagcattaacctcgttcttatagcggagtcggaaatacagatcaataaattcttcgctatcttgaaagcagattctccataaagcttttacttgttcttttactgtcatgttcgccgaatattaccatttaaccatatccatcggatgactcttaagacaagccatatacttctccaagatggtgaccggctgataagataatttggctttgcgtaagccttcgattcctaaatcctcttcccggttgatataaatatactgttcggggattcgattggcaaattcataattgatcatggcgtatgcgccatcaatggtggtgtctgctttttccacgtgcactccgaaggtttcatgattgataggcataccgaaagtaaatgccacgatcttgccgttcacgcgcaggatacctcctgtcaaaccgagcacttcgaagttgtgaagagcataaaccaatgcgcggcgttcattgcctgtcccttcctgttggtcacaattattcactttacaccattcggcctccaagtccaagcattcccggatgcggtccggagtgatcggagcatattcataatccggatacgtgttacgaaaccggttgatatgatttctctttgcctgaaatttcttgccttttaatgtagacaggtcactccgcagataaatataatccgcataatcgcggtcttccgtaaatgtgaattgttccgggaggatagtctcaagctctgcacgcatattggcgcatactcccagcatacagaaggactggttctccttacctgcatcctcgatcaattcttttagagctgctttcaggtctcctgttcctaccggcatcatatacgccaattgttctccggcccagaatttgaaaactaaaaagttgtcgactactgcgaattgagtattatataagaatctccaactgcagagattagaaaatgacaggtcgcagttacgtcgattacttttcattgtgaatgaggtaatcgtgtctttatctgctaatgtgatatcttgaaatggaatcataaagttgcattttgcgtttaactctttatataacggataatcaggatattttgtttttataaaatacctaataatcgaaggatggtaggtgttaataatgctgtgaatataccattcagcgtcagtcccaggctggcgtatgctccatatttgctgctgatatccattgcagtggaggttccgacagcatgggccgctgttcccatggagagaccttgtgcaatagggctgcctacgtgcatgattttcatggtcttaaagccacagatagctcccaatagacctactgccactacaactgccgccgtcagtgacggaataccaccgatggctttggttacttccatcgcaatcggagtagtaaccgatttcggagccagtgacaggattacctcttgtgaggctcccataaatttcgcaatcagtacaactgaaataactccgacaatgcagcctgccagttgagacagaaggataggcaataactgcttttttatcatctccaattgaagatataaaggtacgcctaaagcaacaacagccgggcggagccagaactcgatcagatgtcctcctttattataggtctcgtatgagatatttgtcattttaaggaagatgattaatagggcgatggtcagcaatataggatttaataataccagtcctgttttcttctgaagcaatttggcaaagaagaaaatcccgaaggtgatagccaacaggaagaaattattctctaagaagctcatttggtcttatgtgttaagttgattttacggacaatctgatgtacccatcctgttacgacaagtacaagtgcggtactgacaatggtagctatcacaatcggccagaattcagccgtgattacatcgaagtacaacatgagcgccacgccgggcggaacgaaaaagaatcctaagttagcaaccagaaagtcggacaatccctgtacccagtgcagtttaatccaacctaatttcaaaaagagggtgagtagcagcattccgataatgctggaaggaagtttgattcctgtaaagtaaacgattagctcacccaaagccaaacagccaaataagatggcacactgacgtatcatatactaataacctattgattttgtttgaaaacgctgcaaaggtatgaaaaataggagtacagtgttaaatattataatattttagatgtgaaggagaaaaatggactaaattgtaatgtggatgttacaaaattgactacttttgcaccgcaaataacaaattgtaagcaggttttataataatattcaatatatctatgctcaatttaatcaaccaaatcgttgcgcgtgcaaaagcagaccgccaacgtattgttcttcctgaaggaactgaagaacgcacattgaaagctgccaatcagattttgacagacgaagttgctgaccttattttgctgggtaaaccagctgaaatcaatgagcttgctgcaaaatggggcttgggaaatatcagcaaggctactatcatcgatcctgaaacttctccgaaacatgaagagtatgcacagttgctgtgtgagttgcgcaagaagaaagggatgactatcgaagaggctcgtaatttgacaaacgatcctttgttttatggttgtttaatgattaagagcggtgatgctgacggtcagctggcaggtgcccgcaacactaccggtaatgtattgcgtccagctttgcagattatcaagactgctccgggaatcacttgtgtatcaggtgcaatgttgttgctgacacatgctccggaatgcggaaagaacggtattttggtaatgggtgacgtagcggtaactccggttccggatgctaaccaattggctcagattgctatttgcacagcacagactgctaaggctgttgctggtatcgaaactccgaaagttgctatgttgagcttctctaccaaaggatctgctaaacatgaggtggtggacaaagtggtagaggctacaaagattgccaaagaaatggctccgactcttgacttggacggagaaatgcaagctgatgcagctcttgttcctgaagtaggtgcaagcaaagctccgggttcacaagttgccggacaagcaaatgtattggttgtgccgagtctggaagttggtaatatctcctacaaattagttcaacgtctgggacacgctgacgcaatcggcccgatccttcaaggtatcgcccgtccggtgaatgacttgtctcgcggttgttctatcgaagatgtatatcgtatgattgctattacagctaatcaggctatcgcagcaaaagctaaccattaatcactaacccgtcaaacactgaatacatgaagattctggtattgaactgcggaagttcatctattaaatataaattgttcgacatgaccactaaagaggtgattgctcaaggtggtatcgagaaaatcggtctgaaaggatcattccttaaactgactctgccgaatggagaaaagaaaatcctggaaaaggatattccggaacatacagtaggagtagagtttattttgaatacattgattaatcctgaatatggggcaatcaagtctttggaagaaatcaatgcggtaggtcatcgtatggtgcacggaggcgaacgtttcagtgagtctgtattgctgaacaaagaagtattggaagcttttatcgcttgcaatgacttggctccgcttcacaatcctgccaacttgaaaggtgtgaatgccgtttccgctattcttcctgatattcctcaggtaggtgtatttgatacagcgttccatcagactatgcctgactatgcatatatgtatgctattccttatgaattgtatgaaaagtatgcagtacgccgttatggtttccacggaacttcccaccgttatgtttcaaagcgtgtatgcgagtacttgggcataactccggaaggaaagaagatcattacttgtcatattggtaatggtggttctatcgctgctatcaaggatggcaagtgtatggatactacgatgggtttaaccccgttggaaggcttgatgatgggtactcgtagcggtgatatagatgccggtgcagtaacttttatcatggaaaaagaaggcttgaatacaaccggtgtttccaatttgctgaacaaaaagagcggtgtactgggagtttcaggtgtgtcaagcgatatgcgtgaattggatgcggcttgtaaagccggcaatccgaaagcaattcttgctgaaaaaatgtactactatcgtattaagaaatacatcggtgcttacgctgccgcattgggtggtgtggatatcgtattgtttacaggtggtgtcggtgagaaccagtcactgtgtcgcgaggaagtatgcaagggattggaatttatgggtatcgagatcgataagtctgtcaatgataagattcatggtgacgaagctgtaatctcaactcctgcttctaaagtgaaagttgtagtaattccgacagatgaagagttattgatcgcttctgatacaatggatatcctgaagaaataagttcataaactccggatatagaaaaaggcggctcggtgacgaagctgccttttttattagctatttttcatggttctcgttttttttaccttactttgtatcttgaaatagagccataaccgattgatatgcgttactccgttataattcccgtttataatcgtcccgacgaggtggacgaactgttgaagagtctgactacccagcatttcacagattttgaagtgattgtggtagaagacggttcatctgttccctgtaaagaaatagtagaccgatatacggataagttggatataaaatattttttaaaatctaactccggaccgggacagagccgtaattacggagcagagcggagcgaaggagaatactttattatattggactctgatgtcatccttcccgaaggctatttcgatgcggtagagaaggagcttgccgcttctcctgccgatgcttttggcggccccgaccgtgcacacgattctttcactgatattcagaaggcaatcaactattccatgacctctttcttcacgaccggaggcattcgtggcggaaaaaagaagatggacaaattctatccccgtagttttaatatgggagttcgccgggctgtgtacgaggctttgggaggattttctaaaatgcgtttcggtgaggatattgatttcagtatccgtatattcaaaggtggttacatctgccgtctttttcctgatgcctgggtgtatcacaaacgccgcactgatttgaagaagttcttcaagcaagtgcataactccggcattgcccgtattaatctttataagaaatatccggattctctgaaactggtacatttgcttccggcggcattcacattgggagtagcacttctattattaggaactcccttctgcctcttcagtttcatgccggtcattctctatgcattgctcgtatgcattgattctactattcagaataaaagtctgtctattggcgtttattccattgccgctgcatttatacagcttataggctatggtacaggcttttggcgtgcatggtggcagcgttgtgtcagaggaaaagatgagtttgaggctttccaaaagaatttttataagtaacctacttttaatttgtttactaccattcctatttttacttaaaaggaatgttgcatgacacccgggtctcaatacgtctgacacccgggtctcatgctactcaacacccgggtgtcaggtatgctgagacccgggtgtcgtacaacttgtctctgcatagaaaaaagaagaagcctgcaaccaattttttttccattgcctctatcattaaattaaataagcctatctttacactctcaaaacatagcaaatggaaagtggacacaaactatccatcaaccaatgggcactggaggaccgcccaagggagaaaatgatggaaaaaggagcagcagcattgagtgatgccgaactactcgctatattaatcggctccggaaatacggaagagagtgctgttgaactgatgcgacgcttgcttctgtcttgtgataataaccttaattccttggcaaaatgggaagtctgcgactattcccgttttaaaggtataggaccggcgaagagcattacggtgatggctgcattggaacttggaaaacgaaggaagctgcagagtataaaagaaaggcctcaaatcacctgttcaaaagatatctatgatatttttcaacctctgatgtgcgatttggaacaagaagaattttgggctcttttgttgaatcaggcaacgaaactgattgataaagtgcgcatcagtactggtggaatagatggaacttacactgacgtacgtatgatcttgcgggaagcattgttacaaagggccacgcaaatagctgttgtgcataatcatccatcaggaaacattcatccgagtcaaccggataaaattttgacagaacatattcgtaaagcagctgatacaatgaacattcgtttgatagaccacgttatcgtttgtgagagtcaattctatagttttgcagatgaaggactgctctaaatgaatttattcttatatttgcattattattaacggaaagaacctatggaaaagattgaaatagaagaaaagattgtagctatgctaaaaacggtgtacgacccggaaatcccggtaaacgtatacgatcttggactgatttataagatagatgtctccgataatggagaagtagtacttgatatgacactgaccgcccctaattgtccggctgctgattttatcatggaagatattcgtcagaaagtggaatcggtggagggagtgacttcggctatcattaatctggtgtttgaaccggagtgggataaagatatgatgagtgaggaagcgaaactcgaactaggctttctctagtgatgagtgacaagctgactataagtaacaactcaaagcctatgaagaacgtttatttcctttccgatgcgcatttggggtcccgcgccattgaacatggtcgcacacaagagagacgcctggtgaactttctcgacagtataaaacataaggcttctgccgtttatttgctgggagatatgttcgatttctggtatgaattccgtttggtagttcctaagggatatactcgttttctaggaaagatctccgaacttacggacatgggtgtggaagttcactactttattggcaatcatgacatttggtgtggagattatctcacaaaagagtgtggtgtcattatgcaccgtgaaccgttgactaccgaaatctatgggaaagaattctatctggctcatggtgacggattgggtgatccggataagaagttcaaattacttcgccgaatgtttcatagtacgactttgcaaagaatgttttctgctattcatcctcgttggagtgtggagctgggtttgacatgggccaagcatagccgactgaaacgaattgacggaaaggaaccggattatatgggagagaatcaggaacatctggttttgtataccaaagaatatctgaagagccacccgaatatcaacttctttatatatgggcatcgtcatattgaactggatctcatgttgagtgcaacttcccgtgtgctgattctcggggattggattaatttcttctcgtatgcggtattcgatggagagaatctctttctggaggaatacatcgaaggagagacacaggtgtaattgatcttgttttgtttagacgcagattaacgcaaattatcgcagattattaagattattccttcgggaaattattcttatttatctgcgataatttgcgttaattctatgtttaatctattctacttaggctgtttattcaggtctgaaacttgttcctaagaagaaattgtgtggttcgacagttatattacctgatacttcgtcaccggtcatgtaattgtacttgatgttagaatctagagaatagttggtggtatcatctccaaaatttcctacgactacgagttccttatcattgtatttcaaactgatggtgcggggtgtgttccctgtccaatcagcagtttctactttccatgagaatgttgcattttgcccgaacaaattcgcgtgcgttttgcgtaaatctagtagtttagcatatacatcatacaaacttttgcgtgcaggttcatcataatattcccaatgtaacggcttctttgctgttttttcatcttcttcaccaagtgtttcgtcataacctaattcaccgaattgccaaatcattttaggacccggaactgtgaaacagaaggcagcgttggcggcaagttggttcatgcgggtagtaagatccgtttttattttctcgtttccatacacttgggctttataggctacgcgttcttcatcatgactttccatgaaacctacccatccgccaaaatggatactgtttccgccactttgtatcaaattgctaaaggaactgcgctctgaataccccatccctgattgatagtagccttcatcatgtgtgttacttcctttacgccaacactgtatgcctgccaaagctaatacgttttcttctgcccaatcagtccagtgctcgcaaatcattactgcttctggagatacggattggatagcgttgtaataatcccgtagaatgctgatacgtgactcatcgtaacctgaaacgtccgtatctttatttccgttttgtgtaaaccctttagtcaagtcgaaacggaaaccatcgatatgatattcgttaatcagatattttagattacgttttacaaagtctcgtaccaatggactttcgtggttgaagtcgtggaatacattgaaagcatgacgggcttcaacattgaaccatgggttattctcagcagttcggttatttttcgaatcccaatacagacgggcaaaagtgttgctacctgtagcatggttgtaaacaacatcaaaaagtactgcgatacctcttttgtggcattcgtcaataaatctcttgtacatctcagaagtaccgtaggctttatcaagtgcaaaatagaaggtcggattatacccccaactgtcattgccttcaaactcctgtacgggcattagttcgatggcggtaatacctaacctttccaaataatcgagtttctgtatcgctccctgtagatctccggtttcggtgaagtcacgcaagagtaactcataaatcatcagattgttcttatctgctattttgaaattgtcgtgtgcccatgaataggaatctttctgtatcttgaatgttgaaacaactccggcccctttcgttggatagatacgttgggacgaaggataagtggattccggaatataggaatcgctgcttgcatcgagaatcttctccgtgtatggatcggctatacgtagttctgtgtctttttctccttctacagaactcttctttcccagataatattggaatgcgtattctttggttggctcaagaccgcttaaagtaatccaccaacatcccgctgattcgtcataatacatttgagagttttcatcattgctgcgtttccaattattgaagtctcccatgacataagcataatcgtaataacggttaccgtctttgtctttctcatacagtaccaaagctactgtatgattgtcgataatattgataccatgttgcagtccggaaggtattgactccagctttatctcacccggagtaaagctgttgtacttatcatcctcaatatcgacaaaggtatcttcttctattccttttttgccatcagtagtacggataatcagtcctaactgttcaattggagttgaaccgcttccgaaccaatcgcgtatagtaggtgagagggtgattttccatacattctcctttacacgaaccattttacatttttcggtatcttctgtccaggcagccggtacatacatccaagtaccttccgaatatacaccggcatggagatagcacgcttcttgataacctaataacgggcattctttttctccttctgccaactctttaccttctgcataaaaatagatatccaaagcttcgtccgcattgggtaactcgtttgtttcggctttgggattcaggttgaaaccgaatttcagcaggcttatgtcaatgtcatcctctacaataggttcttcctcttctgcttttgtcaggaggctcagtttgtcggagtctgtccactcgtcactacatgagcttatatagggcgcagtgaatagcagtaataatatatatatcaaatatttcttcataaagcttttcttttttgatggatgggttattctttaatgactattacgtaaggagtcggttcgttgaaataccaacgtatctcgtaattgccggtttggcttacggtaaataggctttcgtcggtaacatccgtttcgaaatgtccttcggcgttttgtggagtcacttccatgttcaatatctgtgaacgtatttgccacgtatttccggcttgcatttttactcctttcttttgtaaataccactttttattactttcatcataaatgatttccattttggatgcatcactgaaagaataattgttatgttcacctaataacatccatgacttttcttcattgctcatggtgaggcgaccgttgtttggattaaattctacggtgtagttggtattgttgttaccgccgtaagaagtgatatttttgctgtcgttacctagagtcaagattccactattgattggagctccccaatttctaccattccaattgggttggtctgtgattttccacccttcataaagattttttgcaataatgtgtcctttgtacgaaccactttctgttttatatagcttttgagtttgatcgtgtttccaagcacagtattctcctactagatagaatacttccggtgtattctcgctattatcataagtcaccgttacagtttttgcttctgataatactcctgtctcagtattaccgaaataagctcttacccgaaactctaccttctgttctgcactaagcgttactgcattatgggccattttcaggtatttgatggccttgcttaggactgcattgtttatatctaggtttgtactggtcaaaccgctttccaatattgctctttgtgagaattctgcgtcttttatatccatttccacttggtatttagctccttctacagcttcccatgctagagaataagaagtgccggaagttaaatccatattttccggaacagtagtgaatgtcggagttgctacatacggagtgatgctgatagtcagaggttcggaagccagcgctttgatatatccgctcttagtagctgaaacagagaggttgatttcagtttttcctacttccttactatattttaccaatagactgacaagtgcatcattcagatcttggtgagtcagattgtatgaggtttcttgagtagtcttgacagtcactttcttgctccaattatattccgtgtttgttttgggcagatttatttctattgcatagctgatacttgaattatcacccaaataagcctgttgccacgttaagggtaatgccgtttcttctttctgaccggccgctaaaactagttcgctaatgtctgttgatgtgatgaccgctgctttgtagcctgtattttcattgtcgtatggagtgacagtggaagaaacgatatttgaaacaagaggagttttcgcctctgaaatgacagaggttacacgaaattccagatgaacggtttctatggtgtatattcctgcttcatcagcataattcttgaacagagacagtacatagtcattcaactctttattcgtaaatgaaacagtcgagttattccctaccaacgaagataagattacttttttatctccgaagttgttttcgccttttatatccatctccagattgttcgtgatcgatgcattatatcccatttggggtgcactccacttgaacgtcagtgcaacttcattttgttgcagcgggttgatggtatacgtttccggtaaagcctccaatacagcaggctgagcctgtccgtcgctataataggctttgtctaagtcactttcacaggcttgtaataaacaaactgcgatcagtatacctatatatccgtatattgttttcatgtacattctgatttttagattaataaccttcgttttgttgtaaattaccattaacgctgatatcgcttacaggtatggggaaaagattgtagcgcttgtctacacctactccggtgatgactcctcctttttctgcccacgtataagtattcgaggtaaacagtccgtaacggattaaatcggtacggcgggtggcttcccaataaagttcacgacaacgttcgtttaagatatttccaaagtttacgttggcagtgcttccattgatggatgcggaagccttcaaccaagctgcatccacttggctataaccggttttggcacgtttgcgcaagtcctgtatgtatgtcacagcttgggattcgcttcctccttctccaccacgggctacggattccgcatacatcagatatacatcagccagacggaatagtggaaagtctgtgtcagggaatacggaattctttcccggagtaccgtcactgttcaggttcgtgaatttaaataccgaccaaccttctgtggtaaatgtaccgatagatgaggttttgatatccaatgaacgtcctgtgctatagaagatggcgcggttgtcgtgtgaatttaaattgtcggcggtccaggctgattcttccgcttcatattcgaacgcacgtatcagatttcctgtagagcggaagccatcccatccaccgttgcatccgtagttgacaacagtgtcttcgctacttgaacgcgagccgacaatgatagctcctattccataggactgagtagtgttgccgtcagccaataccgggaaaatgatttcttttctggcattggtattttctccgttgtccgccataaaaagttcggcataattgtctgccaatgaatagtcattactgcctagaatatatttgcaataagtgatacagtcagtataacggggtgttcctgtataaacttcggcattgagatacatacgtgccaataggaactcaacggtatgttgatcggcacgtccgtattcgtctgtctgttcgggaaggagactacgaatagcagtaagttccttttctagccagttgaataggtctttgcgattgatttgctccggtagcgtcgaggttgtttcttctgtgacaaaaggtggattggcaaaagcatccatcagcacgtagtaggctaaagcacggcagaaacgtgcttcggcacgataacgttcccggtctacttcgtcgggggcattgttcagttgtttcagaaaatcatttgcaatacttacgatgtacatagaacggtggtaaagcccttccattgattccaccttagctgtattccaggataatccgttaacttgcggtacccagctatccgaccaggcgcattttacttcgtctgtagtactttcttgcagtgtccaccaacaacgcaggagtactgtgttaccggcattcaaatcactcaaatccgaagaacctgcgtctttttgtccggagagggcccataccgaatagatctttttcaatccctgtgtgtaactttcgggagtagaataggcgtcttcggccgtcatgacattcggatcgagaggcatcacgtctaaatcacctatacatccgccgaataaaatgagggcggaaaccaatatgatcgattttatagaatagaatttcataatgctgacagattaaaagttaagattaattccgagagagaacgtgcgtggacgcggccatagactttgatcaatggcgttgcactcaggatcgagtccggaatacttggtgatagtaaacacattctgcaccgatgcgctgatacggccggataacttgctggtgaacaaattcttgaaggtgtatcccaaagtaatgttatccatcttcaggaaagaagcattttccaaaaagagatcgcttgctttttgctcggtagaactggtgagagtgaatccggtgctttctactgccgatttataataattggtgataaatccttgattggagaaagcattcagtgaaccgttgtccgctgcactggcgttgtagacatagttcccgatactggcacggagattgaagcccagatcccaatttttatatgtaaactgcgaactcagtcccatgtatacgtccgccatcggactttttttagtcatataccggtcgtcattcgtaatctgcccgtcgttattgcggtctaccactgcgttttgtaccggttttccattctcgtcgtatacctgttggaagagccagtaagtggagggggcataacctacctggtgcttttgtagtactgtgccactaccgtatgaagcagaaccggcattgattccttcataatccggattgtaggtagcggtcaatttagtaattttgctggtgttccaagtcacgttatagcctaattcccaagagaaatctttagtctgtatagctacggcattgatattgaattccaaaccttcgtttttcatagatcccacgttggctgttatcatattggtaaagttgcttcctgccgctacgctgactgtgttcaataaatctttcgtacgcttctgataatattcgatactaccgttgatacgattgttcagaaatccgtagtcgatgccgacattgtatgtcgcagtctgttcccatttcaaatcggggctgtacccatccggtttcagcagatatgaacccatatattgtgaagtcgtattgttacccagcgagtagttagtgatatagagataatcggtaatctcctgctgaccggtgacaccatatcctacacgcagtttcaagttggacataatatcgcgtgccttttccataaacggttcgttgataatgctccatgccaacgctgcggaggggaagagtccccaacggttgctcttgctgaaacgtgaggaaccgtcctgacgtaacgttgcagtgagcaaataacgttctttgaagttgtaattcagtcgtccgaagaaagaaaccagataattttcccaaggtgagggagtgttattgttttgtatgtaacgtccttcatcgtcgttataagtccatccttctttagttcccaggttttcggtaacatttgatttgtaaatactcaggtctctgtaatagaaatgttgccaggaatatccggccattacattgatattgctttgaatggattctatgtttttggcgtagttcaaataaaagtccagcagatggttgcggcgcagattgttccaatcattaccacgtccgatattcttgaaatcactgtctttggctgtttggaaagaaccgggaacggtatagtttccacctgtgctttttgctacgtcataacctacgttcaagttggcatgcaaatcttctaatccgtgtattttataatctaactggatattgccgagacttcgtttagtagttcccgcattgtccacatcgtagagtaaagataacggattggcggaagaaagcgtgttgggaatattcttgccggtgctccagttccaataaccgttatagttatataaattactaccgtatgtagggtcttctgtgtcaataccatagattggtttggtagggtcaaagaaagcagctgctcctactgctcccgaatcagcaaaacgatttttgttaatcgttccttttacattgatatccaccctcaaatgatcatcaaagaacttcggacttagattgacagatgcggtatatctttcatacttggatgtcttgattgtacctcgttcgttgttgtaacctaaagacacgcggaaaggcatgaaccctgcttttcctgctacggatatattttggtcggtgctcagaccactttgatagatagcatcctgccaatcggtagactgttgagggtagagattaatcagattgcgtgctgcatcgcctaaagcggtgccttcggcatattggttcgtcactgcctgacggaactcatctgcattcatcgtttcaaaacgcttataaggatctttgaaagtataactgctgttataagttaccttgatttttccttgtgtccctttcttggtagtgatgatgataacgccgtttgatgcacgtgaaccgtagatggccgttgctgatgcgtcttttaatacggtaaaagtttctatatcattcggattaatggtcgataaagcattcggtgtacccggagctgaattgttggctatggggattccgtctatgacgattagcgggtcattgctggcattcagagaagaaccgctacggatgcgtagcgtagaacctgaacccggaccaccgtcaccttgagcgactgccaatcccggaacttttcccatgatcagttcttcgggtgaagtgactgcacctttgttcatctcttcagctttaatggcaacgactgatccgctcaagtcttctttcttaacggagccatatccgatgaccactacgtcgtccaactgttttgaatcatctttcagaacaactttcatttgtgctgcggccggtaattcctgtgtcttatatccgatgaaggaaatgacaatgatgtctccttgcttggcctgtaatttaaacttcccatccagatcggtaatggtgccattggtagtacctttaattactacatttgctccgataactccctctccggtggtaccgtcctggacgagtccacttactgacaggttttgtgcaactgcctgtaccgtaaacataatggctactaaaaatagcagcattattttacccggttcattcattttttttgttttcatgttattaaataagtttgtcaaaaatagtacttctatatgaatacctattgaaaactatggaatcttaattaaacttgtttaaggtcttattttatctctttgactgagatggcgtatcccccgcctattgcagctttcagtgtaagtttgcttttattgtttattttcttttttgtgataacgtatgcttgcggatttttgtcccaacttgcatctttggcgtcagcataaatggtagcttcatattttttcccaggttcgaggaagtcaaagcttaatttagactcatgtcccttttctccggcagtgcaacctatataccagtcattcgttcctttggcacgacgggctatcgtgatatattctcctggctccgcttccagatacttactttcatcccaatcaatagctacatccttgataaattggaaggcatccatgaaacgctcataattttcaggaatatcagcggccatctgcaatggactgtacatagttacatacaatgccagttggcgggcgatagtagagcgaacctgagagttattagccggattcattttgttacaatgtgtttcgaagatccccggagtataatccatcggtcctccaaccagacgggtgaatggaagaattgtagtatggtatactttgttgccgccgaatgattcatattctgttccacgagcggattcattaccgatcaagttcggataagtgcgacagatacctgtcgggcgtactgcttcgtgagcattcaccataatcttgtagtctgctgctttcttcaccgcatacagataatgattattcatccattgtccgtaatggtgctcgccacggggaataatattgccgacataaccgctctttacagagttatagccgttatccaccataaattgataagctttatccatatggcgttcgtagttacgggctgatgcggaagtttcgtggtgcatcatcattttgacacctttgcttgcggcataacgatgaatctcttttacgtcgaaatcgggataaggagtgacgaaatcgaatacataatctttgctgttaccgaaccagtcttcccaaccttcgttccatccttctaccagtactgcatcaaaaccgttggcggcagcgaaatcgatataacgttttacgttagcggtgttggcggaatgtttgccgttaggtttggcttttgaataatttgtttcacccagttttacgctagtcagctcatcggtgtaggcccatgagccctttccggttatcatatcccaccacacaccgatatatttcacaggttttacccaagaggttgcatccggtaacttgcatggttcgttcaggttgagagtaatacgggatgcaaggatgttgcgtgcatcatcactgacaatgacagtacgccatggcgtatggcaaggtgtctgcatatatcctttgtccccttttgcatccggagtcagccaagattcgaatatcatgtttttatcgtctaggttgaggtgcatacaagaataatcgatgagggctgcctcgtgaaggttgatgtaaagaccatcatccgttttcatcataagagcagtctgcacacctgtcggtgagaaaggagtttgagacgaattgggagtgattgcctgtttcatcaaccctctgatttccgataagcgggagatagtataatcatattcctgcgtatcataatcgcccggtatccaaaaagcggtatggtcgcctgacatggcaaactgggaatgttcttctttaataacgaaataattcaatgatttttgttgagggaactcgtaacggaatcccagaccgtcattgaataagcgaaaacggatcaggatggagcgctcattcattggctggtatagtgtcactgccaattcattataatgattacggatttcttttttcttctccccataccggttgccatgtttcatcgaatgtatcggtctttgcatcctttaattcaaaaccgttataaagatttgtttttgagtcaagtttggtgagatctctacggtctacccagtcgaagtctgtccgggtattgtcttctttctttaattctaaacctaaagtactgggtttgattaccgttttgcctttataaatcaaatcatacgttggagcaccttccttgtttacctgaaaggtcattaccagatttccatccggtgaagtcagtttctgctgcgcattcgctataaatgaaatacagaggaatgcaatgagtaaaagattctttttcattttatttattggtattaaattgtaagctaactaatgtttctactcctttttatttcggatgttgcaaatgtagcgacctattgaatcggaaaaggtgtctagaataaaaatataaccgctttatgattttatttaattgattatcagttgtatattattgtttggaatcggcgaaaatataagtggaaattaaatagtttggcttatctatttcattgtgattactatattcattatatttgtgacatctttaaaaagtaacctatgagaaatatagcctattgtgtattgtcttttcttttggttggttctgtttcaatgtttgcaaaacagacagataatgtggcagctcttaaaaagttggacgacatcataaataaaaaggagacttatcagattcagaaagaaaaggaaattgaaggcttgaaattgcaattggcgcattcaaatgcccctgccgacaaatatcgtctatacggttccttatttgatgcttatcttcattatcaggctgattctgcccttcattatataaataagaagcaggagttgcttccgcaactgaatcgccctgaattggacaataagattattattgatcgtgcaacggtgttaggggtaatgggaatgtatattgaagctattgaggaattggagaggatgaatccgacgaagctggacaaagaaaccttgctggcttattatcagacttatcgtgcttgttatggttggctggctgattacactactaataaggaagcgaaaaagaaatatctcgaaaaaacagatttataccgggattctattattagtgtaatgtcaccggaaatcaacagaacgattgttctggccgagaaatgtatcgtcagtggtaaggcggatacagctctggtgatacttgatgaggctttgaaagaggcggttgacgaacggcagaaagtgtatatctactatacattgtctgaagcgtacggtatgaagaaggattttgagaaagaagtttattatctcatattgacagctattgcagatttggaatcttcggtcagggagtatgcctctttgcaaaagttggcacatctgatgtatgaactaggagatattgaccgtgcttataagtacttgagttgttcgatggaagatgccgtagcctgcaatgcccgtttgaggtttattgaagtgacggagtttttcccgattatcgataaggcctataagttgaaagaagagaaagaacaagccgtttccagagcgatgcttattagtgtcagtatgttgtctttatttcttttgatagctattttctttttgtatcgctggatgaagaaactgtctgctatgcgtcgtgatttgagtttggctaatcggcagatgttggctgtgaacaaagaactggagcagacgggcaagataaaagaagtatatattgcccgttatttagacagatgtgtgaactatctggataagttggagatgtaccgccgctcattggctaaattggctatggcttcccggattgaggatttgtttaaggctataaagtccgagcagtttatcaaagatgaacgaaacgagttttataatgagttcgataagtctttcctgaaactttttccgaatttcatttccgctttcaacgatttgttggtagaggagggacggatatatccgaaatctgatgaactgctgactaccgaacttcgtatttttgctcttatccgtttgggagtggtagacagtaataagattgctcatttcttgggttactcattggcaacgatctataattaccgtagccggatgcgcaatagggccgctggagataaggaacggtttgaacaggacgtgatgaatttataatattatttgttttgtaacatcagaagtagcctttttttatacctttgtaggtggtactaactaatctaataataaatttgctaaagaatgaaaaagttaatctacacattgttctttgtccttatttccgttgtggccaacggtcaggcaaagtatgtattctatttcattggagatgggatgggagtcaaccaagtgaatggtacggagatgtatcaggcggaacttcagaacggacgtatcggtgttgagcctttgttgtttactcaatttccggttgccacgatggcgactactttctctgcaactaattccgtgaccgattctgccgccgcaggtactgcgttggctacaggaaagaaaacctataatcacgctatttctgtgggggaagataagaatgcgattcaaactgtagctgaaaaggcgaagaaagccggtaagaaagtcggtgtcactacttctgtcagtgttgatcatgctacccctgccgcattttacgcgcaccaaccggatcgtaatatgtattatgagattgctcttgacttgccgaaagctgattttgacttttatgcaggtggcggattcctgaaaccgacaacttcttttgacaagaaagaggctccaagcattttccctatctttgaagaagccggatatacagtggcacgtggttacaatgactataaagcaaaatcagctaaggctgaaaaaatgattctcattcaggaagagggggctaatccgtcatgtctgccttatgccattgaccgcaaagagaatgatctgacgttggcgcaaattacggaaagcgctatcgactttttgactaaaggcaagaataaaggcttcttcctcatggtggaaggtggaaagattgactgggcttgtcacgcgaatgatgcagctaccgtatttaatgaagtaaaagatatggataacgctatcaaagtggcttatgaattttataagaagcatccgaaagaaacactgatagtcgttactgccgaccacgaaacaggtggtattgtattgggaaccggaaaatatgaactgaacttgaaagcattgcaatctcaaaaacattcggctgacggactttctcaacgtatcagtgaattgagaaaagccaaaggtaacaaagtgacttgggaagatatgaaagaatttcttggcaatgaaatgggattctggaaacaattacctatttcttggcaacaagaaaagaagttgcacgacgaatttgaaaagtcgttcgtgaagaataaagtggtgtttgccgagagtatgtactcgaagagcgagcctatggcagcttgtgccaaacaagttatggatgagatcgcgatggttggctgggtgagtggcggacattctgccggttttgtgcctgtattcgctattggagccggttcacatttgttcggtgagaagatagataatactgaaataccgaagagaatagccaaagcggcgggatataaataagaatgcccgtgcaaagcacaataaagaaagccggaagttcaattgatcttccggctttctttattattgtgttctatgtaacttatgcttttacacgtcctacgtatgaaccatcgcgagtatcgatttcgatcgtttcaccttcgttgatgaataaaggaacacgtactgttgctcctgattctacagtagcaggtttcaatgtattggtagcagtgtcacctttgacgcccggctctgtataagtaaccttcatctgcaccttgatcggcatatccgcatacaatacggtttcggtagaagcgtcggaaacaacatccaatactgcaccttcaagcaggaagtcaacaccgttaatcaagtcgtgagcgataggatgctggtcaaaagtttcctgattcatgaagatataatcttctccttctttatataagaactgataaggacgacgttctacacgtacgtcttccaatttttcaccgatgttgaaacgacgttcgagaacgtagccgctaactacatctttcagtttagtacgcatgaaagtgttacctttaccaggttttacatgcaggaattctatacagaaatagagctttccgtccatacggatacaggttccgtttttgatgtcttgagcattaatcatactgctattcttcttattatattattgttatttaattgttttcgtcggaaatcgagtgcaaaagtaatctaaatcagtaaaaaacacaaaaacttttgagcaaaaatgagttatctcttggttaatttaaaaaaagtgcctatttttgcagcccgattacgtagaataataacataaaacaagatacaaaaatgaaaagaacatttcaaccctctaacagaaagagaaagaacaaacacggtttccgtgagagaatggcatctgctaatggtcgtagagtattggctgctcgccgtgcaaaaggcagaaagaaactgactgtttctgatgagtacaacggacagaagtggtaatcacttttatctatcatcagggaaacaaaaaaggcggggaatttaatctctgcctttttgtttatagcaaacttttcatcacctcttttttataaattcaactattttgtcgtatctttggcgcatataaacagcaatgcgtatgactattagagaattcttttcttttaaaacaaataaatttttctggttgaatattgccgctatgattgtgatagtggcagtcatggtattcggcgtgctgaaatggattgatgtgtacacgcatcatggtgaatcggtgcttgttcccgatgtgaaggggatgagtgtggaggaggcgacaaagatgttccggaatcatggattggtatgttcggtttctgatacgagatacgttaaggataaggctgccggtatcgtgcttgaactcaagccgggagccggtgagaaagtaaaagaaggtcgtacggtctatctgacagtgaacacgctggatgttcctttgcgtatgattcctgatgtagcggacaatagctctcttcgtcaggcgcaagccaaactgttaagtgccggtttcaaactgaatcaggtccagttagtgaacggtgaaaaagactgggtgtatggcgtgaagtatcagggaagacaactgaccgccggagaaaagattcctatgggagcttctttgacactgatggttggtgatggggcagggagcatggagaaagactccaccgatgttgctgtggatacagaaactcctgtgacatcagaatcatctaccacacaagaagatagctggttttaatggataactaacagaacagactcacatgatagaggaagaacttccggatgaactagagaacgatttggatgatatagaaccggtcggtgacgagtcccaactttacgaacacttccgggtggtggtagataaggggcaggcgatggtcagagtcgacaaatatctgttcgaacgtattgtcaatgcttcgcgcaaccgtattcagaaggctgccgaaggaggattcgttatggccaacggcaagccggtgaaaagtagctataaagtaaagccgctggatgttatcacggtgatgatggaccgtccgcgttacgaaaatgaaattatcccggaagatattccccttactatcgtttatgaagatccctatttgatggtggtgaataagcctgccggattggtagtacatccgggacatggaaattatcatggcactttggtcaatgcacttgcctggcatatgaaagataatcccgattatgatgcgaatgatccgcacgtgggacttgttcatcggatcgacaaagatacttcggggttgttggtgattgccaagacaccagacgccaaaacaaatctgggaaaccaattctttaataaaactaccaaacgtaaatatcgcgccctggtatgggggattgtggagcaggatgagggaacaatcatcgggaatatagcccgtaacccgaaagaccgaatgcagatggctgtgatgtccgacccgacagttggcaaacacgctgtgactcattatcgtgtgttggaacgcttgggatacgtcacgcttgtggaatgtatcctggagacgggacgtactcatcagatccgtgtccacatgaaacatatcggacatgtgctgttcaatgacgagcgctatggggggcacgagatattgaaaggtactcattttagtaaatacaaacaatttgtaaataattgctttgacacttgtccccgacaggctttgcatgctatgacgttggggtttgtgcatcccgtcactggtgaagagatgcattttacttccgaacttccggatgacatgacccggcttatcgagaagtggagaggctatataagtaatagagaattagaatgaaacgcaacattgctatcgtagcaggaggtgatacctctgaaatcgtagtttccctgcgtagcgcacagggtatttattcctttatagataaggagaagtataatttgtacattgtagagatggaaggccgccgctgggaagtacaattaccggacggcaacaaggttccggtggacagaaatgattttagttttacgaacggaacggaaaaggtggtgttcgattttgcttatattacgattcatggcacaccgggtgaggatggtcgtctgcagggatattttgatatgctgcgcattccgtattcctgttgtggagtattggcggctgctattacatacgataaatttgcctgcaatcagtatttgaaggcttttggcgtacgtattgccgaatcgttgctgctgcgtcaaggacagtcggtttccgacgaagatgtaatagagaagatcggtctgccttgttttatcaagcccagtctgggaggttcgagctttggcgttacaaaagtgaagacaaaagaacaaatccagcctgccattgtcaaagctttcggagaagcggaagaagtgatcgttgaggcatttatggaaggtacggagctgacttgcggttgctacaagacgaaggaaaaatcggtcgtcttcccacctacggaagtagttacccacaatgaatttttcgattacgatgctaaatataacggtcaggtagatgaaatcactcctgcgcgtatctccccggaactgaccggacgcgtgcagaaactgacttcggctatctatgatatattgggctgttccggtattatccgtgtggattatattgtgactgccggtgagaaactgaatcttctcgaagtgaatacgactccgggaatgactgctacaagctttattccccagcaggtgcgtgcagccggactggatataaaggatgtgatgactgatattatcgaaaataaattttaatcacgttatggacctgacagagtttaatgagattcgttcttacaatgatgaggaacttcctcagatctttgaagaattgattgctgatccggcttttcaaaaggttgttgccggagttatacctaacgttccattcgaactgctagcacagaagatgcgtgcttgtaagacaaaacgtgaatttcaggaagcgttctgttatggcattttgtggaagattgcgcaggaacatacagattctttgacattagaccattcgcgtataccggatcataatatagcctatacttatatgtcgaaccatagggatattatccttgattcgggttttctttccatcttgctgattgatgaagggatggataccgtagagattgccatcggcgataatctgctgatttacccgtggattaagaaattggtgcgtgtcaataaatcatttatcgttcagcgtgcactgactatgaggcagatgttggaatcgtcggcgcgaatgtcgcgctatatgcatcatactatttcgcagaagaaacaatcaatatggattgcccaacgtgaaggacgtgcaaaagattccaacgaccgcacacaggacagcgtcttgaaaatgctggcgatgggtggtgaaggtgatgtggtagaccgtctgctggaaatgaatattgctcctcttgctatatcctacgaatatgatccctgtgattttctgaaagcgcaggaattccaattgaagagagatgtggaagggtataaaaaaacaacgcaggacgatttaatcaatatgaaaaccggtcttttcggatacaagggaagagtgcattttcaagttgctccttgtctgaacgacgagttgttgcgcatggaccgttctttgccgaaaccggaactgtttgcccgtatttccgctagtattgaccggcgtattcatagtaactatcggatttattccggaaattatgtcgcttacgactggttgaatggttccacaacgtttgctgctaactatacggaagaggagaagctgcggttcataaactatattgaccaacaattggctaagataaacattccgaataaagatgaagacttcttgcgtgagaagttgttgttgatgtattccaatccgttagttaattatttagctgcctgccgatgaaaataggaaagttatatatgatttggttgtggggattactcctcctgatggctgcctgtggtgatgatgactattattatccatcggtaaaaatggaatttgttacgatagaagcgggtgatgatggcaggatacggacacttattcccgataagggggacatattacctgtttcgcaagatcttacggggtctacgatttctccgaatacctccagacgtgtaatgagtaactatgaaacgatggaggaaggggctaaaatttattctttgcagtcgctcctcacaccgactcctaaaccgaaggacgatccggcctttaaggataaggaaggcaaagatccggtagaggttgtcagtatttggcttggacgggattatttgaatatgattcttaacttgaaagtcagtaccgggaaaggacatacttttggcataattgaggataagtcagaactggaaacaacaagatctgtggatatgttgttatatcatgatgcggatagtgatgaagaatactataaccggcgtgcttatatttctgtccctttaaagcaatatgcggaatcggaacatcctgccgatgggattaagattaaattcaggtattatacatacggcaaggaagccgatgtgatagaggattacgaatttgagtatactccgggtaagactgaataatatagaatgatatgcttaaaatgaatcaattggtcgtgggaatgcttttctttctttcttctcttttctcttgtcagcagaaaggagattttgagtcaatgaatgtggaagatttcgatgcgctcattcaagatgagggtatgcaacgtctggatgtccgtacattggccgaatactcggaaggacatatcgcaaaaacgattaatattaatgtgatggatgactccttttcttcgatggctgattctttgttgcagaaagacagaccggtggctgtatactgccgtagtggaaagcgcagtaagaaggcagcggctattttgagtaagaaaggatataaagtctttgagcttgataaaggatttaattcctggcaggaagctggtaaggaaatagaaaagtgatgcaagaagagagtgtcataatgaatgataaaacgcagattaacgcaaattatcgcagaaataatttaatgagttgttgattaacctatcaatataattgaaataatctgcgataatttgcgttttgatactatcttttcttgtcgaggagtatcctctttagggatattcagtaaatgttcctctttctaaaaaatcaagagaaaagctcacgtaaagcaaagcttttctcttgattttttcgttcaactctcccagtcttctatcttttttgtagaatattgtttacatattcttgttttttccttcccacccatgcattatgtacatgtcttttttaggggaagttaaaacctctcctgtttttcctgttattttagtcagattatgctgcctttctttttttcttttcgaccttttctatcatacataccgcattggctgtatgtatcccaaagaaaatccaaagtacttccgttttcctgtttctagcttttatcctggccagtgagtaatgttgtttctgcgttccaaaacttccttccaggcgggtagctctttcgcggctgagttccgaccgtaagattctccgaagcggctcatctttggcagctctgcccttacgcttaaaggaagtacttatatgatattttgtacaaaatttccggttggcattattggcatagattgaatccgccgcaagcgccttaaccctaaccccggtcagttgttgttgcagatgaatacagtctttcaaacgtactccttcgttaaaagccttaaaggagatatgttctataaaggagattccgtctatctgtatattgttgactttggctccgaattcaacggatttggtttccttgcctctgataatggggcgaaggtaatgccggtcgatactcacgatacggttggacacttttttgcctgcaaataaattcttcccttgctcaaggactgtctgtatgaccgagaaacgtctttggtaatcagaggatagtgcaagcctgttcctgtaggatgaatgaagctgctccagctggtcaagtaacttttccaataattgaagtaaccttcgtgtaatcatacgagtctgtgatttcctgcgtttacgcagtttgctataagcaagataggcacggcgtacatcaagatacttgttacggggacgttgtatgtgcaatgtacggcaatgtttgcacagatgacgatgaagccatacaataccttcccataagagtttggcatcagtaggaaaacgcaggtgactttcataacaggtggcatcggtcatacagacatgaaggttctcaagataaggtttccaatgctcggcaagaatgaactggagggactcaacatcaaggcgattcgctagttcctgacgaattgcactaacgattttaggattggttagtggatgaagcggatcaatctggacaccacaaaacaactggtaatgaatattaccgtttaaatgctcaatcagttgtgcatcggaaaagttggtataggacttcaagaccatcaaggctattttaccttcgggagaaaaataacttttacgacccaaagcagaggacttcaaatgcatttgtcgggccagttccgagaaagggaatagagaatggagtcgacctaattcactcgttgcaaaactttgacgatattttttaagcatatcgaactcggtaaaacctaaacaaggttcgatttctgagattttttgtatctttaccatgtgtttttattttagattacccccgttttggccgtcaaaccgttttttggggggaatgcttaaagatacaaaaaaggcaactaattcgcaatgaagtagttgccttaaattttattattttaggaatatccctctttaatagctgtattgaaagattgcctttatgacatttctgttatttcaatccttccaatagtctcttcagaacgacggttgccgagatttcacggttggccgcttccggaatgacaattgattgcggactttcgatcacgtcgtctgtcacaatcatatttctacgaaccggtaggcaatgcatgaaataagcattgttggtcaccgccatttgacggtcgctaactgtccagtcacgatccttactcaatatctgtccgtagttatcccccgcataggctgcccagttctttgcatatatgaaatccgctccttcgaacgctttcatctggtcgtactcaactttggcgttacccacgaattggggatccagctcgtatccttccggatgggtgatgacaaattcgtaatctgtggcgttcatccattctgcaaaagagttaggaacggcttgcggcaatgggcggggatgcggtgcccaagtcatgactactttgggacgtgctgttttcttgtattcctcgatagtgattaggtcagcgaaactttgtagcggatggcgggttgctgcctccatcgagaaaaccggacgaccggaatattgaataaattgatttaagattgtctcttgataatcgaaatcacggtcttcgaagcgtgcaaaagaacgcactccgattacatcgcaatagcagcccattacagggatcgcttccagcaaatgttccggtttgtctccgtccataattacaccacgttccgtttccaacttccaggcaccttgattgatgtcaagtaccattacattcattcccagattaagcgcggctttctgtgtgctgaggcgggtgcgcagactggagttgaagaagatcatcatcaatgtcttgttctttccaagttctacatatttgaagcggtccttcttaatctcaaatgcttcttcaatggccgatttcaagttgccaatgtcctgtacacaagtaaatttcttcatcttatctattatttattcgttattatcttattgtatttctcaccatcttgtctgtccgtcgccttcgataacccatttgtaagaagtgatttcttccagtcccatcgggccgcgtgcgtgcagcttctgcgtgctgatacctatttctgctcccaaaccgaattgtgcgccgtcagtgaaggcggtagatacattggtgtacacacaggctgcatccactatcttgataaacaaggctgcacgctccttgttctccgtaacgatgcattcactatgcttggaactgttttcctggatgtgtcccagtgcgtcttcaaaacttctgaccgttttgacggccattttgtaatcaaggaactctgttccgaaactttcatttgttgcagattgtaagagctctgcagggtagtggccttccaatgcttggtaagcttgtgggtcggcatagataattacgtggctgtctttcagcttctcgcagagtttgggaaggtcgaccagtcttttctcatgcacaatgacgcaatccaatgcgttgcatacgctgactctgcgcgtcttggcattgtggataatatctgctcctttctttacctctccgaactcgtcaaagtaagtgtggcaaatgcctgctcctgtctcaatgaccggtattttggcattattgcgtacaaaattgattaaattactgctacctctgggaataatcagatcaacataacctacagcatttagcaatgcggctgttgcttccctgtcggctggtaacagttctacgatatgcggatttatattaaaacttcccagtacttcgtgaatcacgctgatgatggcacgattggaacagtcggcatcgcttcctccttttaatatgcaagcatttccacttttcagacaaagagagaatacatcaaaactgacattggggcgtgcctcatagattattcctatgaccccgaaaggaacactgatttttgtcagcttcatcccgttggggcgcacagtctctttcagtattttgcctaaaggagaggggagcgtagctacattgcgtgtatctgctgcgatacctttcaaacgctcttccgtcaatttcaaccggtcgtacttcggatcatttgggtccatccgtgcaagatccttttcattctctgcaagaatgaacggtgcttttgcaattgccgcatcggccactgcatttaaaatctgattgatggtatcatcgttcagtaaagccaattctcggcttgctgcctgtacggcagcaaaggttctgtttaaatttgtagtcatttgctccttttttgcattaaatagaaagataaacaatgcaaatatagtgaatgatgtgaataaaacttgttgaaaacagaaataaatgttgtgcctaggttataattgtaataacctttggagtgtatatttttattgtgatgagaaaatatctcatcatgttgagtatttaaacgcgattattattcaatatataaataatcatagtgtacaacaggcttctttccatgttttccgataacctctttggcttgctgggagtcacagtttgcttttcctacacccacttggtttccttgaaagtctatgatacggacaatatcgtctttttcaaattccccttcgatatgagtgatacctatcgggagaatactgactgctttctccgaactgagtacctcagtggcacattcgttgatgtgaatttctcctttggcaaagccttcactatgcgcaatccacttcttgatactggataccggttcgcaagaaggaatgaagcgggtgcaaagagtgctttcggggtgttctaacaagtctaccaagatgttgtcacgtttcccattggcgatgataaccgtaattccttcatcagcaactttgcgggcgatatttgttttcgtcagcatacctcctcgcccgaagctggacttgcttgcttgaatatagttggatagatctttcccatgaccgatttcccgaataacggaagaatcgggatcggacggagagccgttatagattccgtcgatgttgcttaagatgataagtgtctgcgcatccatcatagaagctatgagtccggacaattcgtcgttgtccgtgaacatgagttcacttacggagatagtatcattctcgttgacgataggaatcacattgttttcaagcattaccgtcatacagtttttctgattcaggtaatggcggcgcgtactgaaactttctttcgtagtcagcacttgtccgacggtaattccgtgctcacggaaaagttcgtaataacggttgatcagtttggcttgccctacggcagagaataattgtcgctggtctacactatcgagtttcttctgcggatgtacctcgctacgtccggatgcaacggctccagaagaaataaggatgatttctacaccggatttatgtagttctgctatttggtcaacaagtgcagacatacgggttacgtccaatgttccgtctcggcgtgccaaaacattactacccacttttactgcgattcgtgtaaattcctgtttcatctttgctaacgatttgaaagcacaaatatagagctttttgtcgatatgttaccaaaacagcctaaaaagaattatctttgcagccggatagagaaaagaaaaacaatgaaacatacaaatccgcaagtagaacagatgacctccttcatcgtaatggatgtgttggaacgggcaaacgagttacagaaacaaggcattgacattattcatttagaagtaggtgagcccgattttgatgtgccgtcttgtgtagcagaggctgcgaaagctgcttacgatcggcatttgactcattacacccattctttgggagaccctgagttacgtcgggaaattgcagctttttatcagagagaatatggagtggcggttgatccggactgtatcatcgtgacttccggctcttccccctctattcttcttgccttgatgttgctttgcaattcggagagtgaagtggttctttccaatccgggatatgcctgctatcggaactttgtactggcggctcaagccaaacctgttttggtgccgttgtccgaagagaaaggattgcaatatgatatagaagctatccgcaaatgtgtgaatcagcatactgccgctatttttatcaactcacctatgaacccgacggggatgttattggaagaaagtttcttgaaagaagtagcggctttgggagttcctgtcatttcagacgaaatttatcatggcctggtgtatgaagggcgtgcacatagtattctcgaatacacggatcaagcatttgtgctgaatggattttccaaacggtttgccatgaccggactgaggttggggtatctcatcgcaccgaaatcttatatgcgttcattgcagaagttgcaacagaatctgtttatctgcgcatccagtgttgcccagcaggcgggaattgcagctttacggcaggcggattcggatgtggaacgtatgaggcaggtctatgatgagcgtcggaaatatatgattgcccgtcttcgtgagatcggatttgagattaaggtggaacctcaaggggcattttatattttcgctgatgcacgcaaatttactgccgactcttatcgctttgcattcgatgtacttgagcatgcgcatgtcggtattactcccggagtggactttggtacaggaggggaaggatacgtgcgtttctcctatgccaactcgttggagaatatcaaggaaggactcgaccgtatcagtcgctatctttctcgtcccgggctctgataagctctgtggcggcctcatattcttcctctgtgacaaggatagagacagcaggagcgatatagggagccagcgttcccataataccgtctttgacaacgcaacgaatgtcattgctttccaataaacccttgatgatttcagcttcccacggggagccggagaacacctctattgacttgctataatccttttctttcatgatcttatatattaagggttgctatctacaaatataacaaaaaagaaagacaaatggttatccttcaattaaaatttattcaagcgtgatgtgtttaacacggatttgctgttggaggaaggtggaagctgattcagtgaacttctcttccgcctctgtcgtgtaaaacgagcagttcccgtttttcgtacatttcgcgtccatttccggatgtctcctcaaatagtctttcaggctttgggctacatattcgccttgcgaaatcacgctgatatgttccggaatgtattgccggattttaggtaggagtatgggaaagtgcgtgcatccgagaatcacggtgtctatttgcgggtcttttgtcagtagttggtctatgtatttacggataaagtaatcagttccttcgttttgtgattcattgttttccaccaacgatacccacatcggacacgctactccgctcacccggatatccggaaataatttatgtatctccaacggataagattcggactttacagtacccgctgtagctaatatgccgatatgctggttttgggtgatatttccgatacattccactgtaggacggattactccgagtacgcggcgagccggatctatattgggaagatcgttcatttgaatgctacgcaaagctttggctgacgcagtgttacacgctaatatgaccagatgacaccccatgtcgaacagtttgcttacggcttgccgggtaaactcgtatacgacctcaaaagaacgtgtcccgtatggagcacgggcattgtctcccagataaatgtaatcgtattccggaagtacctctcttattttatctaagatggtcagtccgccatagccggagtcaaatactccgataggaccgggagcatgggataaatgttgattcatgacatacagtatttatgtacgcaaatgtacgccaaaaaaagggaacgagaaagaagattaatcttctttctcgttcccttttttatattttcgcttcttggaactctcttttatttgattccaagatttgctttcaccttattagtcaggttgatactttgcgcttcgtttacgtaaggtattgaagttctagcaaggtcgaagatatagataacaccttcagcagcacctactgctttgatggcatcatccagtttcttgtagataggagccattgcgtcagtctgagctttctgcatctgctgctgagcgtcttgctggaattgttcctgtctctgcatcatgtcctgcaactctttttgtcttctttcagcgatgttagccggaagagagtctttggccatagcctgttggaattcctgatattttttgttgaattcttcctgagttctttgaagttcggcagtcagttgtttttctaatgtctggatatcattttgtgccttcgtaaattccggcattacagtgataatctcctgcgcattaatatgaccgaatttcagattctgtgcaaatacacccattgggagtgcaagcaacattacaagtgcaatttttttaagcatagttctataatttatttgaatgatttttagttatttccggatgcaaatgtatgaaattaatttgaatatcctagttttcttagtatttcatcgctaatatcgatacgcggattggcaaaaatgatgcctgtcgcagaggccctgtcgactaccagatcatatccatattgttgtgaaatggcttttaccgcttcgtaaatatcatcctgaattggagtgatcagcttgtctctcatcttggccaattcaccttccggaccgaaatagttgcgcttcaactcagcagccgctttttctttggctacgatttcatcttctttctttgtcttttgagcggcagagagagtggaggatttcgcttgataatcctgaaacatcttctgagcttcttttgccaaagcttctacttcgctctggtattttttcgtagcttgttgcatttgctcgttggcgctttgagcggtcggaatatttttcatgatatattccgtatcgatcagtgcaaatttttgtgcgttggctgccatactgacggcaaccagcatcatgattaatagaacagactttctcataacgtttagtttttggtgatacattagaattcttgtcctaagataaagtggaattggcttcctccatattgtttagaacctaatacttggtcgaaaccgtaaccccagtcaatacccatcataccaatcatcggcaggaagatacgaacaccgacaccggcggaacgtttcaagtcgaacggattgaatttcttgatatcatgccaagcattaccggcttccaagaaacctaacacataaatgttagtacttgtttccagcatgagcggatatcttaattcaatgccgagacgtgcataagcgtaaccttccgaaccgtatggtgtcaatgaactgttttcgtaaccacgtaaggcaatactttcggttgcataagttgaataaccggtcataccgtcaccaccaacgtcaaatgtaccaaacggtgactttttgaactcgttgtagtgtcccaacaagccgaattccgtacgggtcatcaatacaagacatttcggatgtgcaaccgggtccatcaacggagtgtatgttttgcctttgaatttccatttgtggtattctacccatttatgaagcttgttcatattgtcttgagtaatggttccggtttcaggattgctgtaatatcctttatagtctttgccgtccattaatgagtaaggtggtgtgaactgcactgacaatgagaaatccgaacccgaacgcgggaagattgggttgtcaatagagttacgtgccaaagtcagtgaaaggctgaggtcattacatttaccgtttgttaccgggaagtactgccagtctttcaagttgtaacgttgataagccaactcggcagaaagggtgaaatagtcatccggccatttcagacgtttaccccaaccaacggaaagtccccacatcttgatcgatttatcggggtcataatagttctcgtagttgttgtaattgccatagttgtacataccataaccgccataaccgctatacatactgttatagtagttgttaaagtagctggagttgtagtaacggctactgatatctgtctgtacggagaagaacgccgaaacagagaatgagttcgggcgtttgccgccaaaccaaggatcgaagaatgaaatactgtatgattggtagtatttggcattcgtctgtccgctgatagtcagtgtctgtccgtcaccttgcggcaggataccgcgataattctcacccggatgcagtaagttggcaacagagaagtttgtgaacttcagactcagtttaccgataatacctgtttgtccccaaccggcagagaattccacctggtcattggctttggaagtcaacggcaggcctatgtcaaccgttccgttcatcgggtccggttgaatatccggctgaagtttttcggggtcaaagtgtcccatctgctggatttcacgcaaagaacgcatcaagtcttctttgctgaacaactgtcccggacggatacgaagttcacgacggactacattttcatacagacggtcgttgccgctgatgttgatcttattgatagtagcctgacggccttcatagattctcatttccaggtcgatagagtcgcctacaatgttcacttctaccggatcgaggttgtagaacagataaccgttgttgtagtataagttaccgatagcgtcatcatctgtagagatacgttcgttcagcaacttctggttgtacacatctccttttttcatacgcagaaggaagtccaactgttctgaaggatacagcgtgttacccacccaagtcacgttacggagatagtatttctgaccttcctcgatatcgagataaacattaactgttttctcgtcgtattgtgagatactgtcttttctgataactgcatcacgataacccagctcattatatttgtcgatgatgagttgcttatccgcttcgtagttttccggtacgaatttcttcgtgcggaacaagttacgaagtttccctttttcattggttttcttcattactcgtttcagcttggaagctttgattgccgtatttccaacaattttgatttcgtgaacttttactttctctttcttgtcaatgtcgatgtccacaattacttggttctcgctggagggatcatctttttgtgcgatgataacttctgcattcttaaaacctttatcgtcaaaataacgcttaatcaatgttttggcccggtctacggtattcggtgtaatctgcatacccttcaccattcccaacttaccttccaaatcggtacgctctgacttcttaacgccatgatagcgtacctcagagattcggggacgctgtgtcagactgatttttaaccaaattttgttgccttctatcttttcggctgtgatttgtacgtttgagaacaagccatgacgccaataacgtttgattgctccggtgatttcgtcacccggcacagtaattgtttgtcctaccgacagtccggatagtccaatcaatacatagtcttcataattcttcacgccttcgaccttgatatccgctatctcatactttttgggtgttccagagtataagatgacaggtttcgagtcttcatcagtgttggcattttgcgcaatacctgttgttgcaaaactgaacaggtagataaacgttatgaatataaaggaaatacgataatgcatttatgttataatttgatgtttcgagttatattagctgatttgttcactggtcttgccgaatcgtcgttcccgctgttgatattcgcaaacggctttatagagttcttctttgtcgaaatccggccaaaagatgtcacaaaaataaagttccgaataagcacattgccatagcaggtaattgcttagtcggatttcgcctcccgtgcggattaataaatccggatcgggcataaaattagtattcagatgtgatgcgatgcattcgtctgttatctgttcaggagataaatctccttctttaatcttcgtagctatttgtcggactgcttcggttatttcccagcgtgaagagtagctaagtgccaacactagacacattcccgtgttttttgcggaatgatctatgcatgatgttaaactatcctggacttcaaccggcaatttctttaagtcaccgattacattgaagcggagattgtttttcatcaatgtctcttccttaatagaatccagcaatagattcatcagtgccgtaacttcctcttgcggacgactccagttctcggtggagaaagtatacaaagtgaggtacttgattcccagacgggctgcatcttcggtaattctctgtaccgtttctgcgcctgcatggtgaccgtaagtacgttcttttccccgttgctttgcccatcttccgttaccatccatgatgatggctacgtgttggggtatccgagttttgtctatttgctctatataggacatttttctattttaaacgtatgcgtttattattgacctgcatgcttgggatccttatcaaaccataattggtttaagcgtgcacgccagatttctgaatcatgactataaggatgtgtattctcaccttcttcgagtaaaacatctcccttactgaataagaagtaaatgtagtcattctttgtgtcttgtactacggagtaattagttcttcccatgaattccggtttttctattgttggtttgaactcggggtcactccaatcctgataagggaatgagaactttttatccgctttttgccaagcaattccttcagtctttgaaacatagatggattcaaacttgtcaccaaaagtataaagaaggttattgtaataaataatagtcggattcttgaactccggacaataagcaaccgttgaagtggttcccaactcagcccatgttgttccattgtatccccatgctatgctgactggaatttctttatcaccaaccgttattttgatagattcatcatgttcacctattataacattctgatattgtcctccttttttgaaagttgtgtatgaaatgttctttgttgggaaattcttaccggctgcttgtattttagtttcagcatttcctatccctagttccgattctaaaatggaatacaaataacgtacgttatcttctgtcttgagataagtggcttgttgaatgtacttctcttcttcggtttgtctattgtcattctcaatgggtattgctgaaataaatgtatttacttcacctgaaaatttatttgattctgtccatgctataccgtcggtagattcatacaccttattatttgcggtagccaatataatcttctctaagggtaatatggagttaggaagagttgctaatcccgttgcatcttgcaaactccaattagataagtcactactgctatgtacttttacacttgacccatccatagaataggtgaaatattcatctttaaatttaatggttttctgtgctcctttaatctcatcacctatttccccgacatatccccagcttaaagaatccggatcatgtttgtgtactctgacctcaataatatatggctttactttgttaggggctattcctgccagtgcctcagtagaccataccttgatttctaattttttacgaaggtctagtgaatcgttaatattgataatagagtctcttccttctttgtctttcatggtgatgacgcctgaagctgttgtcagcgtcttaatcaagattttgtcaataatagtatctgcgtgaacagggagtgaatcctgattatagataaggccattttgttggtcaatagtgaacttgtaggatatcccatatattgtatcaagttcaaatgcatgtatagttgcatctgggctatattctatgtcattatcgtcatcaaggcatgacgttataacgaatgacaccatgaaaaaactcgcaatgaatgataaaaactttattctcatttgaaagattgtgtttatttacaagttgcaaaaatagaaacatttttcccgataatgaacattacaggtaagttttatataaaattatagataataacactgtttttatcgacgtaaaactccctgaataggactattttagctaaatccgatgaacataataccaaatttgtcttccgaagtgttctttggtcgagtaactaaaattattgcttatttcaggtgctttaacaccggagtataaccgcttggggcacttctctatataggcttcatcccataattcattgtcaatgaatgattgcagcagttggcttccgccttctaccaacaatgattgtatatttcgttgatataactcttccataatcagcttcagagggttatgaccaaaatcaatagttatatagctgacgctcttttcttccggatgttctttctctgtgaaaactaatgtcgggacctctccgttgaatatttgcaaatcattcggaagagaaaggttgcggtctaaaacaatacgtatagggttacgtccataccagttgcgtaccgtcagagagggattatccagcaaggctgtccgtcttcctaccataatagctgtattctccgctctttttttatgtaccaacattgacgtaagaggggaggagagaaggacaggattcccatcaattcgctctatgtcaatgaatcggtcggccgattcagcccatttaagagtaataaaaggtcggcggagcgtgttgaaagtgataaaacggcggatcagatgcaggcattcttcttccagcacaccgactataacttcccgtccggcattctgtagtttctgaattcctcgtccggctactttggaaaagggatcccggcaaccaatgacgatacgcggaatctgtttttcgatgatcaagtctgcacagggaggtgttttaccatagtgggaacaaggctccaggctgacatagattgtcgaacgtttcaataaagactcatccttgacggagcggattgcattgacttcggcatgcgcttctccgcaacggacatgataaccttcaccgataatgcacccgtcgcatacgataacagcccctaccatcggattgggagctacgttgcataacccgttctttgcgagctcaatacaacgtctcatgtatttttcttcttccattttggtactcttcgctatattattcttacttttgcactccgaaactgtaaatgtatgaatcgtatctccacccgcattcgccaatctctgcgtgatatctatccgccggaagagcttaaagctcttacgatgatgatttgttgcgatatgctcgggttcgatccgctcgatatttacttgggcaaagatatgattttatccgaatgcaaagagcgtgaattagaaaacattatattccgtttacagaaaaatgagccgatacagtacattcgcggctttgcggaatttggtgggaggaagttcaaggtagctccgggggtgctgattccccgtccggaaactgcggagttggtagattgggtcgtcaatgagaatccgggggcacatcacctattagatataggtacgggaagcggatgcattgcaatttctctggataagagacttccggatgccgatgtggaagcttgggatatttcggaagaggcattagcgatagcccggacaaacaacgaagaactggaagcccgagtgctgtttcggcaaagggatgttttatctgacgattgggaaaagtcaccgtcgtttgatgtcattgtaagcaaccctccttatgtcactgaggcggagaaagatgaaatggaagctaatgtgctcgattgggaaccggcactggctttgtttgttcccaatgacgacccgttgcggttttatcgcaggattgccactctggggcgtgagttgcttctgccggaaggaaaactttattttgaaatcaaccgggcgtttggccgggaaatagcatatatgcttgaaatgaaccaatatcgtgatattcgtgttataaaagacatctttggaaaagatagaatagttacagctaaccgatgagtgcacaattaacagacgaagaggctttaagtcgtgtagcctcctattgctctactgccgagcattgccgggcagaaataagtgagaagttacaacgttgggggatagcctatgacactatagcgcgtattcttgaccggctggaatcagaaaagttcattgatgacgagcgtttctgcagggcttttgtgaatgataaattccgttttgccaagtgggggaagatgaaaatagcgcaagggctctatatgaagaagattccatccgacgtagcatggcgttatctgaatgagattgatgaggaggaatatcttgctgtccttcgtggactgctggcctccaagaaaaaaagtgtccatgcgcaggatgaatatgaactgaatggaaagctgatgcggttcgctatgagtcgtgggtttgaactgaaagatatcaggcgttgtatcgatgttcccgatgaagaggagcaggtggagtaaaaaataaacggattcttctttttattctcgttctatttctgtacttttgcggcaaataattaatagttagtttagttatgaaaaacttagagagactatttgcggagaaactgttgaagattaaagctattaaacttcaacctgctaaccctttcacttgggcttctggatggaaatcccccttttactgtgacaaccgtaaaactctgtcctatccttctcttcgtaattttgtgaagattgaaattacacgtctgatattggaacgattcggacaggtggatgcgattgcaggtgtggcgactggtgctattcctcaaggagctttggttgctgatgcattgaatttaccgttcgtatatgttcgttctaccccgaaagaccatggattggagaacctaatcgaaggtgaacttcgtccgggtatgaaagtagtagtaatagaagatttgatatctaccggcggcagtagtttgaaggctgtagaggcgattcgtcgcgatggctgtgaagtaattggtatggttgcggcttatacgtatggcttcccggttgctgaagaagcattcaagaacgctaaagtgactttggtgacattgaccaattatgaggccgtgcttgatgttgctcttcgtacaggttacattgaaaaagaagatatccagacactgaacgaatggcgtaaagaccctgctcattgggatgctggtaaataagactttttttgattaaatatatgtcagtaaaagaactcttcggacaatatttgcccggatagttctttttttgtttttatacaaatagaatattatgactaaatttgagagtagtgtcaaggtgataccttacagtcaggaacgagtgtataacaagctttcggatttgagtaatctggaagccattaaagaccgtttgccgcaagataaggtacaggatttgagttttgattcggatacgttgagttttagtgtttctcctgttggaaagctgacactgcaaatcgttgaacgtgagccttctaaatgtgtgaagttggagacaaccaactcaccgcttccttttaatatgtggattcaattagtggcgaccggtgaggaagaatgcaaaataaaggttactatcgggatggatatcaatccgtttatgaaagcgatggtgcagaagcccctccaggaaggtttggagaagatggttgaaatgctgtcgattataaattattaattcaagtattaattggtatggcacagaaactttgggagaaatccgtgcaggtaaataaggatatcgaacgctttacggtgggacgcgatcgtgaaatggatctttatctggccaagcatgatgtgctcggctctatggcgcacatcacaatgctcgaaagtatcggtttgctgacgaaagaagaactggagcagttgctggctgaactgaaaaatatttatgcttcagcggagaaaggtgaattcgtgatagaagatggtgtggaagacgtacattcgcaggtggagttgatgctgactcgtcgtttgggagatataggaaagaaaattcatagcggccgttcgcgtaacgaccaggtactgttggatcttaaactctttacccgcacgcaagtcagagaaatagccgaagcggtagagcagcttttccatgtattgatttgccagagcgaacgttataaaaatgttttaatgccgggatatacacatctgcagattgccatgccctcttctttcggactatggttcggtgcttacgccgaaagcctggtggatgatatgctgtttctgcaggctgcatttaagatgtgcaaccgtaatccgttaggttctgctgccggatatggttcttcgtttccgttgaaccggacgatgacaactgagttgctcggttttgactctatgaattataatgtggtatatgcccagatgggacgtggcaagatggaacgtaatgttgcgtttgcgttggccacgattgccggaacaatctccaaattagcttttgacgcttgtatgttcaacagccagaacttcggatttgtgaagttgcccgatgattgtactacgggttccagtattatgcctcataagaagaatccggacgtgtttgaattgacacgtgccaaatgtaataagttgcaatcgcttccccaacaaatcatgatgattgccaacaatctgccttccggttatttccgtgacttgcagattataaaagaggtctttcttccggctttccaggaattgaaagactgtttgcagatgacaacttacatcatgaacgagattaaggtaaatgaacatatcttggatgatgacaaatatctgctcattttcagtgtggaagaagtgaaccgtttggcacgcgaaggtatgcctttccgcgatgcatacaaaaaggtcggtctggatattgaagcaggtaaattctcgcatagtaaggaagtacatcatacacatgaaggaagtataggcaatttgtgtaatacagagatctctgcattgatgcagcaagtggtcgatggattcaacttttgcgggatggatagagcagagaaagcactgcttggaagataaaatgaactttcggaggatagttttttaaactttcctccgaaaagatttggcagaaacaagtaaactacttatctttgcacccgttgaaaaaaagcggaaatagctcagttggtagagcataaccttgccaaggttagggtcgcgagttcgagtctcgttttccgctcttctttgaaaggatgctcgaatggtggaatcggtagacacgagggacttaaaatcccttggccattgcggctgtgcgggttcaagtcccgcttcgagtacaagagtaatcctttatcgcctgcaaatcaaaaagttgtaggcgattttctttttattgctgaaacattgctgaaacttttttctttgctgaataataggagtgtaagcggatattgtgtatgtggtacccgtgcgggtgaattcggatggcgtgcatacgcttcccggaacaaacgttgcctattacctgctctctaaacctatcaagattaccaaggtggggcagttcaatacttcttggtatgaagatagctacattagggtacgtttcccggtaggtacttatttctcttcgtttacgtatgaggcattggtttatgtcaattcattcggaggaaacaatacgatcatgggaacggagggtgtaatgcaattccgtattggagatgatccgggagtcccttacaattgtctggaaatagctggtcgacagaaatacaatgtgacgaagccgttggagtccaaacgttggtatcatgtggctattacatacgaacaacctactggaaagacaggtatttatgtgaacggtgataaatgggcaggttcagaatggggcattgacggttttgatccgaattcggatgttggtttctatatcggtcgtatcaacgacttcgaatgggggggaacgtccgctgaatggttatatgagtgaagtacgcgtgtggagtgtggtccgtacagagaatcagttgaagcagaatatgcttggtgtagatcctacatcggaaggattggctctttattacaagttggatggaaccgaaattcaggaggacggaaaaataaaggatgctgcgaaaggactcaacggtacaaccggtggtagtattaccatcaagacgctggatgctccgatagctatcaattgatgaacacacaaatttgtgagagtttttgctctttacatttttgaatatgaatgaaagcctgcttactgaaaagataatattcttttggtaagcaggtttcttttattgatgttggcgtgcatattataatcagggcatttcttttcttctttacaagaaaaggtattttagccaaatttaaattttctctaaaaagttttcttattataggtaaaatatatttctttgcagcatttaatatttatggatatactggcgaatggctcaaatcaacttcaactcgatatatactgcttattataggaaagccttcctatttaccttgtcctatgtccataatgacttagtagcagaagatattgtgtcagaagctattatctatttatgggaactaagtaaagaacgggaaatcccaagtgttgaagcgatcttaattacttatattcgcagcaaatcactcaattacctgaaacatatacaagcacaggagaatgtttttcaaactttgcttgataagggacagcgtgagttggaaattcgtatatcaacattggaagcttgtgacccgaaagaaatattatcagaagaattacgggcaaaagtgcacgcattattggagagtatgccggaaaaaactcgtactgctttcatccgcgaccgactggatggaaaatcccataaagaaatagccgaagaactgggcgttagtgtaaaaggagtagaatatcatatcagcagagcagttaaaatactgcgtgataatctaaaagattatgctccattccttttctttttcatttgaaaagaaggaaaatacctccttgcttgctattttttttaagcaataacaaaaaaatcacatttcttactagggaatctctttagtgagtggtattcttaatgaaaggagaataatacccctattctcattactcataaattatttattgtatggataaggaattactattaaaatatattgcaggcaaggcatcccaaaaggaaaaggaagatgttgctgcatggattgatgcagatgcagccaatcttaaagaattcatttctcttcgtaagagttatgatgcattcatctggcaagacacaggcgcattctcaaagaggacaaaaaagataatttcattgcatcctgttacacaacgaatcttgcggattgcagcagtgtttgttgtagctttcggattaagttatgcaatgatacaggttcttcaaaaagaggatatggaaatgcagactgtttacgtgccagccggacaacgtacattggtgacacttgctgacggaactacagtatgggtaaatggaaaaagtacattgactttcccgagccatttttcttcccgtacacgtactgtggaacttgatggagaagcctattttgatgtccggaaaaatccggaaaaacagtttatagtttctaccgctcaccagtctgccataaaagttctaggtacaaaattcaatgtaaaggcatacaaagaagcagatgaggtaattactactttagttgagggaaaagttaattttgaattcaacaacgccagtcaacaaccgcagtatattgtgatggctcctggacagaagctggtctattattcccagaatggaaggacggagctctatacgacttccggcgagagagaactttcgtggaaagatggcaaaatcattttccatcaaacgtcattacgggatgcactggatatcttggcagatagatacaatgccgaatttgtcatacaggagaatgtacctcatgacgactcattctccggaacatttaccaaccggaatctggaacaggtacttaactttatcagtgcctcctcgaaagttcgttggcgttatctgaataataatgcagatgccggtaaagagaaaataaagatagagatatttatttagtattaaaagataaaaaccttaattcccaaaaacttattgccatgaaaaacaaagatccctagcaacccaaaaaatacgggatgatattggccgtatcctcccgtatgagcttcagtaattgtgaacctacttgtttcccgacaagtataactaccaattttctaattaaaactcgttacaaatttatgcaaaattattgtatcgtccaatttcttggaggattaaagtctattagacggaccttgaaggaaatatcattggctatgaaattactatttatactccttatttgttcagccggactagcgtatgcatcagatggatatgcgcaaaaaacttctatcactttacgggttagcgattgtactatagaagaagtgctgcacaagattgaacgtgaatctggattcagcttttttataaatagcaagaatcttaaccttaatcgccgggtatcggtttcagcttccgaaaaaaatatttttcaggtgttggaacaggtctttgcaggtacaaatgtcgaatataaaatattggataataagattgtactgacggctaaagaaacgaaagtaactcaacaaaaaacaaaacccgttgcaggtacggtaaaagacaagaatggcgaaccgctgattggggtctctattatggagaaaggaaccactaacggaaccattaccgatatcgacggaaattataaacttgctacacagactacgtctcctgtacttgtgttttcttatgtaggttatcaatctaaagatgtgcctgtgactgggaatatcgtgaacgtaaccttggatgatgcgactcaagaattgaatgaggttgttgtcacagctctcggtatccgtaaagaggcgaaagcactttcttataatgtgcaggaagtatcttctgatgaaatagtaggagtgaaggatgctaactttgtaaacagcttgtccggtaagatagcaggtgttgttatcaattccagctcatccggtattggcggtggagctaaagttgtgatgcgtggagcgaaatctctttccggaaataacaatgccctatacgtgatcgatggtattccgatgccttcattggatacgacacaacccaaggatcattttactggtatggggcagtcgggtgacggtgcctctatgattaatcccgaggacattgaaagtatgtcggtactcagtggtgccgctgcatctgctctttatggaagtgaggctgcaaatggtgtcattatgattaccacgaagaaaggtacgaaagataaattacgtgtaagctacgccaataacacttcattttacaatccgtttgtaactccagagtttcagagtacatatggagccactagtggttcacttcaaagctgggggcagaaacttgctcaacctagtacatacgatccattagacttctatcaaaccggttggaatgaaacaaattcattgactattagcaatggtaatgagaaaaatcagactttcctttctatggctgccactaatgcggagggaattgtacagaacaacacactcgaccgttacaatttcacaattcgtaatacgactagtatgctggacgataaattgcgtcttgaccttagtgctgcttatatgaatgttcgtgaacagaacatggtttctcaaggtcaatacttcaatccgattgttgctacttatctgatgtcaccgagctatagtcttgaaacctatcagttgtttgaaatgtatgatgaaagccgtggcttcaagacacaatactggccttggggcaatatgggacttggcatgcagaatccatactggattactaaccgtgataattttatcaatcataaaaatcgtttccttgttagtggtggcctgagctatgatattgccaaaggaatcactctcggagcgcgtgctaagatggactatacttctgcgatctatgagaagaaatattcggcttctaccgatgctatttttgcacaaaagtatggtgcctattataaggcagatgcttcaactcgccaactttatggtgatgtgatgttgaatattgataaatactttggagatttttctttgacaggtacagtcggtgtaagtattcaggatcttgattaccagtattatagtgtaggtggtgatcttaactctgtagcaaatagctttacactcaagaatcttaatcagtcgaatgcggaattcgatcaggatggttatcacgatcagacgcaatctatctttgctactgctcaacttggttggcagagtaaactttatcttgatgtgacaggtcgtatcgactggtcatcagctttagcttggactgaaacaaagtcggtggcatatccttctgtcggtttgtctgctattcttacagacctgcttcctattaggagtgatgtattgacatttttgaaattacgcggttcttacagtgaagtaggtaatgctcctacacgttacattgcatatcaaactcatccgtatcagtcggggactcctagtacaacttctacttatccgaattcggacatcaaacccgagcgtactaaagcgtgggaagttggtttacagtcacgttttttgggggataagctggcactgaatgtatctctttataaaacatcaactttcaatcagttgtttaatccttcattaccttcttcttcgggatattcttctatttacattaatggtggtcaggtagataacaaaggtattgaagcaagtctatctcttagccaggcactaggtcccgtggaatggaattcaactcttacttatacgatcaatcgcaacaagattaagaagctcttgaaacctactacattaaaagatggtttgttggtagaacaagatatgttagatttggacggagtgggtaatgtaaagactcgtctttttgagggtggatctgttggtgacctttatgtgactgcattgcgtactgatgaacatggatatattgatgttgattatgtgaataatacggtatctgttgacggaaatgccggtgaaagaggagatggttggatatatgccggaaattcacaagccaaatatacaatgggatggcgtaactctttcagttggaaaggattgacacttggcttcttgattaatgcccgtgtaggcggggtatgtgtatctatgacacaagctttgatggactcttatggaacatcgaaagctactgctgatgctcgtgatgccggtggtgtgatgattaacggttatttggttcctgctgctcaaaaatattaccagacagtaggtacaggtgccggttctatgtatgtgtatagtgctactaacattcgtcttgcggaactctctttgggatatgatgttcctgtcacaaaacttgtaccttggatcaaaggcatgaatgtagcatttaccggacgtaatctttttatgttctattgtaaggctccttatgatccggagttgactgcgagtaccggaactcatttcagcggtatggattatttcatgttgccgagtttgcgtaaccttggtttctctgttaaacttaacttctaaagaactttgaagatgaaacagattttgaaatatacaaaatttattagtggtgcattccttacaggaagtttgcttttcacttcttgcaccgatcagtttgaaaagtggaatatcaatcctaatgaagtgacaccagagcagatgacgtatgacaacctgaatactggtgcatactttactcaaatggtaaaaggggtatttatcgtaggtaaaagtgcggatggtgtaggtttgggcggaagataccagatcacggagatgctaaccggtgatatctttgccagctatatcgccaatataaacacatatagctacaccacttatcataatgaccactatgctctctatcgtgattggtataatgctcctttcaatgatgcatatactaatgtcatgcagccgtggaaatctattgtcgaaaagacggacgaatcatctccggcaagagcgatggctactattgtaaaggttttaggaatgagtcgtattactgatatgtacggccctataccttatagtaagttcggtacttctattcaggtgccctatgatagccaaaaggatgtatactatcagttttttgatgaattggaagatgctattaaagtgttgacagaatatagtaatgccaactctgctaactatatggaacagtatgactatatctatagtggtaacgtagccaaatggattaagtttgccaacacgcttcgccttcgtttggctatgcgtatttcttttgtggataagacaaaagctacagaagaagctgctgctgccattggacatagctacggtttgatgacttctacaagtgattcagccattcttcaccaaatgacttctttcacctttactaatccattgtgggaagtgagcgagagttttcatgatatgcgtatgggagccacgatggattgttatttgaatggttataatgatccgcgtctttccagatatttccggccgacagtaaagaatggcggttatcatggtgtaagaaatggtttgaccggaatatcaaaagatgcttataaggaggcggcatcagggcttaattttgatgaaaatagcaatatgcaatggatggatgcggcagaagcttattttttgcttgcagaagcgaaactaagactcggtcttggttcggaaactgtacaaacatattatgaagaaggtattcgtacttcattttcctcgaaaggtgccactggggcggatgcttatattgctgataaagatagtcgtccattagagacatataccgatccaacaaccaatcgtggaacatcagtgagcagctctctttctcaaagaggcattgcctgggaagaagacgtgagtgaggaaatcaaattggaacgtattatgattcagaaatggctcgctctttatccagacggacaagaggcatggagtgaaatgcgtcgtaccggctatcctggttttgtaagaattagttcttacaattatacgaatgaagtcaagagcaatgaacttatcagtcgcttgaagttcccaacgacagaatattccgataacagccaaaatacgcaagcagccgtatcattgttaggtggtggcggtgacattgctggaacaagactttggtgggatgtgaggagataacaacaagtctaataataaacaattaatctgaatatgagaacaatcaactatttattgactcttatagtagggatggggggactgatggtctcgtgtgatacggatatcgagtcagaatcaattcagcacccttatacttacagtgacttatattatcagaatttgcgtgactttaaagcgagtgaccatgaaatatcgtttggatggtttgcgcaatatggagcacagaactcaatgggagtacgttttatgggactgccggacagccttgatatttgttcaatgtggggaggtattccagcaaaggaaaacactgatatttgggaagagatacgtttcgtacaaaaagtgaaaggaaccaaaatgcttgcggtagccattacacgtattgatgcagaaacggacgatcatgattttaagaaagcatataatgaggcgaaagcaatgccggctggtgaagaacggacagctgcgctcaatcgttcttttgagatgtacgccgagtattttctcgatcaagtgtttttgaatgatcttgatggatttgatgccgactatgaaccggaaggggactttttgagcggtactaactttgagtatttttataagcatatggcaaagtatatgggaccgaatcctgatataactaaagaagaacgtttgaagcttattgaagaacgctacggtaaggaaattgcttcgcaggaaggtatctgtgacaaaatgctcaatatcgaccaaaccagtgctaatcaaatggccagccttgttccgtatagcaattattgtttcttgcaggcctatggcggtggaactggagccggttcgtggccggacgagaaagttgtctattgctgtaatatgggtgacaattggcaaggtacgatggagtcaatgtataatcaggctcgttataaaccggcatcgggtagaaaaggtggttttggggcattctttattcatcgtgattacaatgtacacgaaaataatccgtacccgtataaacgttttcgtgagtgcattcagattcaaaaccctgcaattcattaattaatcattttaattaaagaatagaaatgaagaatataaaaaacatattttatgtaggtatgctggctctttgtaccatgagttttactgcatgcagtgacgaagagacctacgactttccaggagatccatataatcatgtgtatcttcaagataaaggcggtacttttacatttgtccatactccgatatcaagtattagtactttagaccttacgttacctttgtattgtaaccatagagtgacatctaattttatagctaaggttgaggtcgataattcattggtagcagcctacaatgaagaaaataatacagagtatgcagaaattcctgtatcctcattggtgatggaaaatacagagatcagattcgaacaaggcggattgatgtcagttaacgaattgcatattacaacaaatgaagctatcaatgaattacgtgacgtaaatggatatttaattcctattaggattacggctgtggaaggagaaaattgtaaaatagttgataagatgtctacgacttacgtaattgtaaatgtaaaggaagatactgataatatttatgatgatgcagctgacgaactggtgacaggtacattggtaagtgatcgtagtggatggacggcgattgttcctgacggtgctgatgctcaagctatgttcactgaaagtgatgattattggagtggccgtgccagtgctgctggagaagaacttcctgttattatcaactttggaaagccatacacttttgatggaataagtgcttcatatttgtattatggttattatacgtatgcaagttggacaaagagtagtaaaattgagattagtggtgacggaacaacttgggaggaggtagggatactttctaatacgaatatcattcaagtgttctatgctcctgttacggcacaatatcttaggattacagtgcctgctccgtcaagttcttggtcgagtgcgagctttagctgtggtaacttcaatatttatgcaaaataatctatagaacgttatgaagaaatatacattattatctctatttgctttgttgctctgtatgacaggctgcaaagaaggaccggattttggtgatgcactgtatgtgacgggaacattaacatcatctaatgttcgttttttggtagatggtcagtcgagtataggtctcacggtgacatcaacgactaaaactgatacggatgttaagattaccttacagcctaatcccgggctaattgatgaattcaatgcatctacaggtcgtaattgtcaactaccgcccgaaggaagctatacagtagaaggtacggaagttattattgatgcgggtaaatcgcaatcttcacagattaaggtgagtgcaaattctgataaattgcaggaaggagtttcttattgtttgccagtatccattacttctgtagaaggaggtgatttaaaggtactggaaagttcgcgtactgcttatgtgatgcttactaaagtgattaccatcaaggctgcttatctggctcgaaaaggttgtttcgacataccttcatttggtggggaagatagtccggtaaaagcacttggtcaaatgacgttggagatgaaagtgctccctgtttccttcccgacttctgctagtagtgcaaatggtattagctccttgtgtggctgtgaagagaatttccttttccgttttggcgacggtgcgggtaatcctactaacaaattacaatttgtgaaaggctctattggtgccgcttctcatccggataagaaagatcattacgagtcttgggtggaaaaagagtttgaaactgggcactggttgcactttgctgcagtttatgacggtcaatatttgcggctttacttggatggcgaacagattcactttgtagaaaccagaaatggtggtactattaacttgagtatggcttatgatggacatacatgggaagatacatttgctatcggtcgttctgcgggttatgcacgcttttttgacggttatatcagtgaatgtcgtgtatggaatgtggctcgtactacagccgaacttgaagacggtatttgttatgtcgatccgacaagtgaaggcttaatctcttactggcgtttcgacggtgaaacacaggaagacggtactgtgctcgatatgacagggcatggacacaatgccaaaccgtacggtgatatcacttatgtagacaatcaaaaatgtccgttctaaaataagggataattagatttgaatatttactaaaagaggcatcctgttttgcgtagtggaatagggatgcctctttttctaaaaacatactcactatgataaaaacatatttgtcttttcttgtggtagtactaaacacatttatagtgttatttgctcaacaatcatgcggttttccctataaaaatccgactttacccgtagaaacaagagttgcggatttactatcccgtatgacattagaagagaaagtcggtcaactcctttgtcctttgggttgggagatgtatgaaatcaaaggtaacgatgtactcccttctgataaattcaaacaatttataaaagacagaaaggccggtatgctttgggcaacctatcgcgccgacccgtggacaaagaaaacattgtcaaccggactgaatcccgcattggctgcaaaggcaggaaatgccttgcaaaagtatgtgatggagaatacccgtttggggatccccttattcctggcagaagaagcgccgcacggccacatggcgattggcacaaccgtttttcctaccggaatcgggatggctgcaacttggtcaccccaactgataaatgaggtaggtaaagcaatcggcaaagagatacgtcttcaaggcggacatatcagctatggacctgtactcgatttagcccgtgatccccgttggtctcgcgtggaagaaacttttggcgaagaccctgtattgacgggtgaaataggaaaagcgatggtggcaggattaggtagtggagatttgtcacgtccatacagcacgctggctactctcaaacacttcctcgcttacggtatctcggaaagcggacagaacgggaatccctcttttgcaggtatgcgtgaactgcatgaaaactttctgccaccatttggacaagctatcaacgccggagcattatctgtaatgacttcgtataattcgatggacggtaccccttgtacagccaatcattatctcctgaccgaacttctacgggatgactggaaatttaaaggggttgtcgtttccgatctatacagtatcgaaggcattcatcaaagccattttgttgcttctacaatgaaagaggcggctgtaatggccttatctgccggagtcgatattgatcttggaggcgatgcctatatgaatcttatggatgcggtgaaccggaaggaaataagtaaagaaatccttgatgcagctgtgagtcgtgtacttcgattaaaattcgagatgggattgtttgaaaatccttatgtggatcccggaaaagcgaagaaagaagttcgtagcaaagaatacgttgctctggcacgccaagtggcacaagcctcgatcaccttattgaaaaatgaacactcgctgcttccattagacaggagtatgaaagttgcactgatcggacctaatgccgataaccgctataatatgttaggagattacaccgctccgcaggaagaagaaaatgtaaagaccgtattggatggaatcagagcaaaactttcttcctcacaggtggaatatgtgaaaggctgttccattcgtgataccgtgacgtctgatattgaacaagctgttgcagccgcccggcgttccgaagtcgttattgctgtggtaggaggctccagtgcccgtgatttcaaaaccagttataaagaaacaggtgcggccattgctgatgaaaagacaatcagcgatatggaatgtggtgaaggcttcgaccgggcaacgctttctttattaggaaaacaacaggaattactcaaagccttgaaagctaccggaaaaccattaatagtagtttacattgaagggcgtcctttggataaaaactgggcgtcagaaaatgcagatgcactgctgacggcctattacccgggacaagaaggggggaatgccattgctgatgttttattcggtgaatttaatccggcaggacgattaccattctctgtgccccgttccgtcggacaggttccggtatactataataagaaggctccccaaagccatgactatgtagaaatgtcagcttctccactttattctttcggatatggcttgagctataccacttttgaatattcagatttacatctgtcggctctgacaccacactctttcgaagtttcatgtaaaatccggaacaccggaaagtacgatggtgaagaagttgttcaactttatttgagagatgaatatgcttcagtagtgcaaccgttgaagcaattgaaacattttgcacgcctctttttgaagtgtggagaagaacaggaagtgaagtttattttgtccgaagaggattttgcacttgtcgatcggaatttgaaaagggtggtagaaccgggaactttccaagtaatgatcggtgctgcttctgatgacatcagattgcagacgaaagtggagataaaataggagataccctctattcatctatgaaacaaaaatatcaaatttagatctcacagtgatttgcacctgttttattgtcaaattgtcaatataatatctaaacggatgaatatcaggtaattactgtctgataatagccactgaaaacaggctgacaataaaagatatcaacttttattgtcagccttgcttttgtatcttataatatctttactacctgatagacagtacctttataagtatgtttcgagctaattccgcacttttgaagcattctcccgaaatgatatactttgttgtcggacaatgaaataccgcttttcttcttcaagtaattcagtatttctaccggagtaaagaattcaccttcctctcccgcttgtggagccctaaagtattgataaaacagttggagcatagccggtgtttgctcaaactcccggttgttctcggtcataatctgctcgtcttcactattaaaccagtaacgctcaccatgagaaatttcgtgcatggcttgcgcgtaaagctgctcataatctatcggctgtgtagtgtcgatgtttcctgtcacttcaatacagatgaagcgacggctccccgaagggtcggtcaacagatctttctgattgcttgtgccgataaatgaagcataccgttgtaactcaagcaccgagcggccatgtggttttcgaaggttgaccaccggtttttggagaatatgtttcagaaacccctgttgggtcagcgtaatctgatcgaactcatcaatgttgatgagcgcaaaacgattcagatacagttccgcatcccgtttctggctgaaatcaatactgtccgtatagtaagcccggagtgcaggcggaatcatttcacggcaaaaagtagatttatgagttccttgtgctcccactaatataggcgatgtactattggcatacattttatttactcctctccaatgcgaaaccatattcaagaaccagcgatgaaaaagtaattcccaatgcggattattgcagggaaccctgttggctaacgcatggatacggtctttcccatcccaatgtggcaggtgaaacagaaactcctctagcggattatagataggcacacggttggagtgcaagtaacggtctatgtccctgtcccatactccgattccttcagattgggcgtccagcataatgctgttttgtgcccgtttgtcgatgggatggaaatagaaccggaacgagaaacgctcccggtattccacctctccgatctgcgtattgtaacggagctcataacggcggttcataaattcatccatttgcaggctaaggcgttgctctttggttagacagttgcttttcggcactcccttacattccttatatacgtttcttatcatttcacgtaccagcattggattctttcttttgttgtaacggatgatggtgcgtctggttgcctcctcttccggaatgcctgagtagtagcagttctcggcaagcgggactattaatatttgcaaatcatcatcccgatgccaggcttggtccatttcttcaaaggtctttcgcaatgctgcttcataaagcagtgccactgtatcctccgtatcatatcctggcagggcacgattcaatggcgatgcttctgtgttcgatttctcatgataagtcatctcgccgggcataccgataggttgtgaaagatagaaaggaacaggagtggggcgataaatcaagtccggatcatagctaagacgtgagaactgttccagtttcggctcttttagcagaatattgaaaggaagttgaggctgataacatttgatggctaggcgataggcatgtgcctgaaacacttcggcctcttccgctgtttgcggcaaagtgccgtccggtcgggtgaagcaagtccatattttgacacttttgccgcttgctcccatgaaagccagcattgtctgaggaagttcggcagccttttgcttcacaatctccacttctgtttttccggctaacggaccgacggtcagttctacaatcccattgtaggttttcatttgtctcactccgttcactcgcccgaaagctgcggcaggaatcactcgcggcaatttgctagtgagtgaacaaggttcgtcgggcagaacaaaatgcagggcttggcgtagttcggataccaggcggagcttggtctctcttttcattttttctatcaacaggtcgatgtttaccacacttaatgcttccgtatctccattttccctgatttgtgtaattttcatttctatttatcttaaattttatagagttgtaagtgtttgtttataggtttcaaaggtacggataaggtgcttgtaaaacaagctatttggcttttatcatgataaagaataagcttttggaggatgagaagcggatatacttccactatcacacggatgtatttccatttgtgtgccgatatagttccgctaaggtatcagtgtctttagtttgtcacggccgtggtgagatcttctcacagccgtggtaggaactcatcacagccgtggagagatctcaccacagccgtgacaaattggcaatgtcagtgcattagtataaatgaataggctgacaatagaagttctagcttcttattgtcagcctattgtcagggcttattgtcagcaggtaagcggttgataatcattgcgctattcaagaaaagacgtcagctgacaataaaaaccttcaaattaatatgtaaacctaaaacctaatgaaacctttctacttgtaatcataatcaaaatctttaataatataatagtgtgtgcttgattttactgcggcaaagataaggtagaaaaataaaatagaagtgtaattttgtttcatatatggtatacaaatgattcattgaatcaggatttctattaattggtcagtttgtatcattgttcacaaaagaaatcctccttcacttgcctaaagacagttgaaggaggattttatcgatgaatagggctctttttacctacttctcatcattcttacgaatttctacacgacgaatcttaccgctgattgtcttcggaagttcatcgacaaattcaatcacacgcggatacttataaggagcagtcactttttttacatgattctgcaattccttaatcagttcttcacttgcacgggctttgtagtctttcgaaagaacaatcgtagcttttactacctgtccgcgaatttcgtccggtacaccggtgatagcacattcaatgactgccggatgcgtcatcaacgcgctttctacttcgaacgggccgatacgataaccggaacttttgataacatcgtccgcacggcctacaaaccaaagataaccgtcttcatctttccaggcaacgtcaccggtgtagtagataccgtcatgccaagcttcgcgagtacgttccgcatcacgatagtactctttgaagagaccgatgggtttacctttgctggtgcggattacgatttgtccttgttctccggcttcaacggaacgaccttcgtggtctatcaagtcaacgtcatattgaggattcggcagtcccatgcttcccggtttcggttccatccatggcatcgtggcgacggtcagtgttgtttcagtctgcccgaaaccttccattagtttgatacctgtcaattttttgaaggtatcgaatacggccggattcaatgcttcgcctgcaatggtgcaatatttgagtgaggacaagtcgtatttcgtcaggtcttcatgaatcaggaagcggaaaatggtgggaggtgcgcaaagtgaagtgacatgatagtcgtgtatcttttgcaggatatctccgggagtaaatttctcgtggtcataaacgaagatattcgctccggcaatccattgtccgtagagctttccccaaacagcttttccccaaccggtatcggcgatggtaagatggaggctttcctcattcagattgtgccagaaactaccggttacgatatgtcccaacggataggtaaagtcatgtgctaccattttgggttcgccggtcgtgccggaagtaaaatacatcagtgagatgtcatcattggtattggcatggcggggacgtacgaacggagcggcattctcaattccctgatggaaatcttcgaaaccttcgggaatctcaggaccgacgctgaccagcttctccacagtgggacagtcgggcatagcctccttgatatgttggagaatcactccttcaccggcagccacaatcatcttgatatcagcggcgttgcaacggtagactatatctttctttgtcagcaggtgagtggcgggaatgacggtcgctcccagtttatgaagtgcgataatgctataccagaattcatagcgacgttttaaaatcagcattaccatatccccgcgtccgatccccagactttggaaataagaagccgtcatatccgtataacgtttcatgtcggcaaatgagaactgtcggctttcgcctttgtcgtttgtccaaagcagggctttcttgtcgggttgctcggcagcccaagcatccactacgtcataaccgaagttgaaattctccgggacgtttatttttaagttcttgatgaaatcctcttgtgaggcaaagttagtctttgctaaaaatctttctatcatgatattgttacataattacagccagaaaacgtaccgttttgccgtcgagcgctttcatgccatgtggaagtttggagttaaaataaatgctgtctccttgattaaggataatttctttcccttcgatgttgataagcatacgaccttcaatcacaaggttgaattcttgtccgttgtgcttgttgtaatgaatcggctcgtcatcacctttcggctcaacggtcacaatgaagggatcggcggtgcggttcatgaatccggaagccaatgactggtatttgtaggctttcgtacgttctatactgacacctttgcctgcacgggttacgaaataactgctcatcttgggctcctcaccgaacatcagcgcatcaagggctatgttataagtgcgggctatcttttgcagcatactgacggagatgtcatagtcgcctgtttctgcgagccggtattcttcggcggatatgtcactgtcgcgggcgatgtcctcagcggtcaattccaacacatcccgcaatccacggagacgttctgctatttgtttaatctgatcattcatgttatttagtgattagtttgttagtgattaatgatttgcagcagccattatttgctggccttcatggctttaatgatagcggaggtgaaaccgttatgttccagctcgttgattcctttgatggtgattcctcccggagtagtcactttgtcgatttccacgctgggatgagtgtcattattcagaatcaatgaggcggctcctttcagagattgtgccaccatagtcatggcgtctttcggacggatacccatttcgatacccgcttgcatggctgcctgaacgtatttcagaacgtatgcgataccgcaggaagccaacgccgtagcggctgttattttgtcttcggggataagcatgactgtgcccatctcgctgaatagccggaggatgaacttgtcttgttcgtcatttgtattgcgggcggcaacgagtgtcatactttccagttcactgatggcggtgttagggatgaggcggaacatcggcatttccggtactaccacataatgtgccagctcttcaaaactgattcctgcggctacggatataagtatctgcttgcccttcagcttcaactcgcgcattaccggctgcataaaccaaggctttacggcgaggataacgatgtccgctcccgttgccgcttccgcgttattgtgagttgtagagatgttcggaaattctttcttcagctgttccagcttgccggcgctggggttggatacgataatgtccgaatcttctatcagacttccttttgccagaccacgggcgatagaaccacccatgttgcctgcaccgataatagctattttcatacgacgcttgtttttaatgaattgttacagacaaaggtaacggttaattgcgaaaaaacaaaaagcagcccggataagaaataaaattctgaggtaggctgctttttatcgttggctgtttattaatcaatatgagcggttagagtacttttttgaaccgggcgaggaattcgtcggcctcctccatactgagacagagagggggaagtaggcgaagtacattcgtgccgcttgcgccggtaaatacatgttcgtcataaatgagacggctacgcaactctttgatcggttcttcaaattcgagtccgatcatgagtccgcatccgcgcacttctttgatttgcgggaatttcttaagttcttgcagcaggtagttaccaaccttagccgcattctctacgagattctcctgttcgatgacgtccattacggcaagagccgcagaacaagcgaggtggtttccgccaaaagtcgttcccagttgtccgtatacaggtttgaacatcgggctgattaagacgcctgccatcgggaaaccatttccgatccctttggctacagtgatgatatccggcttgatgtcacaatattgatgggcgaagaatttaccgctacgtccgtatccgctctgaatctcgtcaagaatcagtatcgttccagtttcgctgcaggctttgcggagttcctgcataaattcaacggtcggtatcttgataccgcctaccccttgaatcccttcaatgataacagcacaggtatctccttttgacaattcttgcttcatcgcgtcgatgtcgttcagagggagataggtcacgtgaccgttattgttgataggtgcgatgatcgacggattgttggtggcttctaccgccagagacgtacggccgtgaaacgccttgttgaaggaaatgattttggtacgtccgttatggaacgaagccaatttcagagcgttctcattggcttccgcgccactgttgataagaaacaggctgtagtcctcgtagccggagatttttcccaatcgttcggctacctgttgttgcagcttgttgatgacggagtttgaatagaaacccaagtttgctacttggctactgaccatttctacatagtgcggatgtgcgtgtccgatggagataacggcatgacctccgtaaaggtccagatattccgtgccgttttcatcccaaacgtgacaacccttccctttgactatgttgatattatataaaggatatacgtcgaataatttcataattctgttatttttaaaaagcactcggcttcaaacgtaggcctacggtttcttccagattgaacatcaggttcatgttatgaacagcttgtccgctggcgcctttcagcaagttgtcgatacaagagataatcaatagcttgtcgccatgcttttccagatgtatcagacatttattagtattgacgacttgtttcaagtcaatattcttgtctacgatgtgtacaaaggagtctttggcataatattcttcatacatacggacaatctcttcctgtgatactttggtctttactaccagagtggcaaagataccgcgtggaaagtcgccccggtacgggatgaaatcaatctctgcatcgaagctgttctgcaattgcttgagtgactgcttgatttccggcacgtgctggtgttcgaatgctttgtacacactcatattattgtttctccagctgaaatgactggtagctcccggttttacaccggctccggtacttcctgtaatggcatttaccatcacgtcgtctgtcagcatcagattcttggctagcggaagcaagccaagctggatacaggttgcaaaacaaccgggattggctacgtgcttcgccgtacaggtggcgcggcggttcagttccggcagtccgtagatgaagtcatgatcgtcacttttgatgcggtaatccatggaaaggtcgataatcttcaagtcttccggtatgttatggctttccatgaatttctttgtgtcaccgtgggcagtacagaagaagagaacatcgatttcgtccaaaggcaattgatcggtgaatctcagatctgtctcaccgtacaatccttcatgtacgtcggtaattttgtttccggcattactgctgctgttgataaatacgatttcggtttccggatggttgagtaacagacggattaattcgcctgctgtatatcctgcgccaccaatgattcctgctttaatcatatctcttcgtctttatggttattatagtaaacacgcaacggagtagaagtcactttgataaagcctttggcgtcttcagccgtccagcctttctgcatctcaccgtattctccgaatttagtcttaacaaggtcatcttcggattctacgcctacggtagagaaagaaagcggacgaagttcgaggatagccgtaccgtttacgttgcgttggctttcctgcaacatcgcttcgatatcacgcatgacaggttccaaatactggctttcgtgcaggaacataccataccagttggctacctgatctttccaatattgttgccatttgctcaatgtatatttttcgaggaaacggtgagcgccgataatcaacatcggagcggcagcttcgaatcctacgcggcctttgataccgataatcgtgtcacctacgtgcatatcacggccgatgccgtaagctgcgccaatttcttccactttctggatagccttgatcgggtcgtcaaacttctcgtcgttgacagccttcagttcgcctttctcgaaagtcagacggagctgttcgcttccttctttctgaacgtgtttcaagtaagccgattccggcagtccttgtgcggaatcaagaatctcaccgccacaaatggaagtaccccaaaggcctacgttataagagtatttcagtttggtgaagtctgcgctgaaaccatgcttgttcagatagtctatttcctcctggcggctcaatgccatatcacgggttaatgtgataatctccacgttcggtgccagcactaagaaagtcatgtcgaaacggatctggtcgttacctgctccggtagaaccgtgagcgatggcgtccgcaccgatttcattggcatagcgtgcaattgccaatgcctggaagatacgttcggaacttactgagatagggtaagtgccgttgcgcagtacattaccgaaaaccatgtatttcagactcttctcgtagtattcctgagtgacgtccaacgttacatatttcacagctcccagtttgtaggcgttctcttcgttcgtctttagttgttctgcgctgaaaccgcctgtattggcacaagctgcatatacttcgtaacctttttctttggcgaggtacatgacggtgaacgatgtgtccagtccgccgctgaatgccaccactacttttttcttcttttcttccatagtgtgtatattttaaatgttatttctttcttgttctttttttatgttccgtgggtctgtcggatcgtacagcatggctgtgcagatacagaacttacggttcttggcaaccaatatgtcgtggttgatacatccttcacatcctttccagaaagcttcgtcgtctgtcagctcgttgaaagtgacaggaacgtagcccagttccgtattcatcttcattacggccgcaccggaagtcagactgaatattttcgctttcggccatcggaggcgtgccagttggaaagaagcctgtttgatacgttttgccagtcccaaaccacggaaatccggatgaacgatcagaccggaagttgctacatattgcttgttcccccatgattcgatgtaggtaaatccggcaaatgtctctccacaaagtgcgataatcgcttttccttctttcatttttgtcgctacgtattcgtgggtacgttctgcgattcctgttccgcgtactgcggcagcctttctgatagtgtccaaaatagtgtcaacgtaaacctcgtgtgaggcgtcggctaccataacatctatttgctgagtgtccatttctttattatataatataggtatagttattcgatattcgggatgacgactgccaaaagctggcgtatcttgcttggggtaactccttcacgcaaaactaacatgattgtgtcgtcaccggcaatggttcccagaatgtcactgaactcattgttgtcaatgtcatatgccatgctgcttgcatagccgggacgggtacggatgacggcaatgttgccggagaaatgtaaagagataaatccgttgctgcgcaacatttcaccggcgctttggtcggtggaacgtttatacatgatgttgttgggcaatacatatacatactttccgttcatactggcagccttggctactttcagttgtttcaagtcgcgggagagggtggcctgtgtcagttcgtagccttcacggttcaactcttgcagcagttcttcctgtgaaccgagctccttgcttgagataatcattttgatggcatctaaccgatttgctttcttcttcattgtatatttattctaagaatggcgcaaaagtatgcaatatttcggagaaaagatgcataaaaccaaagtttttttgcataaaagtgaaaaatatgctaaacggtgagagcctgctttttttgttttgtgtcaaaatgtataccctttcaatcaaaatacataaggaaagggaggagggaatcgcctatctttgccatgtaggtaaatggataccttaatatatagacagaataccatgaaacaaaacttttttgcagtcgacctgggcgcaacgagcggccgtacaatcttaggaactttcatcgaaggcggattaaatctggaagagattaatcgttttcctaatcatctgattgaggtgggtggtcatttctattgggatatttatgcattatatcgccatattattgacggactgaagttggttgcccgccgcggtgaatctatagcctctatcggtattgatacttggggggtggattttgtgtgtgtcggaaaagacggaaacctgctccgtcagccatacgcgtatcgtgatccgcacacggtgggagcaccggaagcccttttttcacgtatatcccgtagtgacgtttacagtaaaacgggaattcagataatgaattttaattcactttttcagttggatactttacgccgtaaccatgacagtgcattggaggcggcagataagattctgtttatgccggatgcgttgagttatatgcttaccggagaaatggtgacggaatatacgattgcttcgacagcacagctggtgaatgcgcagacacggcgtctggaaccggagttgctgaaagcggttggactgagtgagaagaatttcggtcgttttgtattcccgggcgagaaagtcggggtattgacggaagaagtacaaaaaataacaggactgggggcaatacctgtcattgcagtagccggtcacgatacgggttctgcggttgccgccgttccggcattagaccgtgactttgcatatttgagtagcggaacttggtcactgatgggagttgagactgatagtccggtgattaatgctgaaacggaggcgttgaactttaccaatgaaggtggcgtggaaggaaccatccgtctgttgaagaatatctgtggaatgtggttgttggaacgttgccgtctgaattggggggatacaagttatcctgaattaatcagtgaggcggatacgtgtgaaccgttccgtagtttgattaatccagatgatgattgctttgcaaatcctgctgatatggaaaaagccattattgaatattgccgggttaccggacaaccggttccggagaaacgcggacaagtggtgcgttgtatctttgaaagtctggctttgcgttatcgtcaggttttggaaaatctgcgttcactctctccacgacctatagaaacattgcacgtgattggcggaggtagtcggaatgacttgctgaatcagtttacggccaatgctatcggaattcctgtggtggcaggaccgtctgaggcgacagccatcggtaatgtgatgattcaggctatggcggcaggtgaagcaacggatgttgccggtatgcgccggttgatccatagctctattccgttaaaaacttatcagccgcaggatacggaagcatgggatgcggcttatatccactttaaaattgtgttcgataattaattagataaccgacagaataatcattttaataaaagaatatcatgaaaaaagaagaactgattcagaaagcgtatgaaattgctgcggaacgttatgcggcagtaggtgtagacaccgagaaagttttggaaactatgcaggattttcacctgtcactccactgttggcaggctgatgatgtgactggatttgaagtgcaggcaggttcattgaccggaggtatccaggcaaccggtaattatccgggcaaagctcgtaacattgatgagttgcgtgccgacatcttgaaagccgcttcttatattccaggtactcaccgcttgaacttgcatgagatttacggagatttccaaggcaaggtggttgaccgcgatcaggtagaaccggaacacttcaagagttggattgaatggggtaaggagcataacatgaagcttgacttcaactctacttctttctctcatccgaaatcgggcgatttgtcactctccaaccctgatgaaggtatccgccagttctggattgaacataccaaacgctgtcgtgctgttgcggaggaaatgggtaaggcacagggtgatccgtgtattatgaacctttgggtacatgacggaagcaaggatatcactgtaaaccgtatgaagtatcgtgcgttgctgaaagattctttggatcagatcttcgctacagaatataagaatatgaaggattgcatcgaatctaaggtgttcggtatcggtctggaaagctatacggtaggttccaacgatttctatatcggttacggtgcttctcgcaataagatgatcactttggataccggtcacttccacccgacagaaagcgtagctgataaagtatcttcattgttgctttatgttcccgaactgatgttgcacgtaagccgtccggttcgttgggattcagaccacgttactattatggatgatccgacaatggaactgttcagcgaaatcgttcgttgcggtgctttggaccgtgtacattatggtcttgactatttcgacgcttccatcaaccgtatcggtgcatacgtaatcggcagccgtgccgcacagaaatgtatgacccgcgctttgctcgaaccgattgcgaaattgcgtgaatatgaagcaaacggacagggattccagcgtctggctttgcttgaagaagaaaaagcgttgccttggaatgctgtttgggatatgttctgcttgaagaacaatgttcctgtaggtgaagatttcattgcagaaatcgaaaagtacgaagccgaagtaacttctaaacgataagttatggatattttaattggcttgttgattatagccatcggtagcttttgccagtccagttcatatgtacctattaaaaaggtaaaggagtggagctgggaaagcttctggttgatacaaggtgtatttgcctggttggtgttcccattcttgggttcactgctgggcgtaccgcaaggaggcagtctgctcgacttgtggggagcgggaggtgccggtatgagcatcttttatggtatattgtggggagtaggaggattgactttcggactttccatgcgttatctgggggttgcgctagggcagagtatctcgttgggtacttgtgccggtttcggaactcttcttccggctctttttgcaggcacaaatttgtttgaaggtaacgggttgattctgttgttgggtgtttgcatcacattggcgggtatcgctattatcggctatgccggtagcttgcgtgcacaaaacatgagtgaagaagaaaaacgtgctgccgtaaaagactttgcgctgacaaaagggttgttggttgccctccttgccggtgtcatgagcgcttgctttgccttggggttggatgcgggaactcctatcaagaatgaggctctagccggtggagtagaagggctttatgccggtcttccggtaatcttcctggttactcttggcggatttctgacgaatgccgcttattgtctgcaacagaatgtggctaataagtcaatgggtgactatgccaaaggaaaagtgtggggcaataatctggtgttctgcgccttggcaggtgtgttgtggtatatgcaattcttcggattggaaatgggtaaaagtttcttgacagaaagtcctgtattgttggctttttcctggtgtatactgatggcattgaatgtaactttcagtaatgtttggggaatcattttgaaggaatggaaaggagtatcaaataagactataactgtgctgatagctggtctgatcgtacttatcttctcattagtgttcccaaatttgttttaaaatttataggtacggattacagagattacgcagttttttataacttgcggcgaaatctatgtaatccgtatacaattaaaaaatatatataatgaaatcaattttagagaatcgtccggcacttgccaaagaggtaaataaggtggctgaagttgccggctacttgtggcagaaaggatgggctgaacgtaatggtggtaatatcactattaatatcacagagtttgtagacgatgaaatccgtcagatgaaaccgatcagcgaagtaaaatctatcggtgtgactcttccttatctgaaaggatgttatttctactgcaagggaactaataagcgtatgcgtgatttagctcgctggccgatggagaatggttcggttatccgtattctggatgactgtgccagctatgtgattatcgctgatgaggcggtggttccgacatcggaattgccttctcacctgagtgtgcacaatgacctgttgagcaaaaactctccttataaagcatctgtgcatacgcacccgattgagttgatcgccctgacacattgtaagaagtttctggaaaaagatgtggctaccaatatgttgtggagcatgattcccgaaacaaaggcattctgcccgcgtggcttgggtatcattccttataaattgcctagttccgtagaactggcggaagctaccattaaggagttgcaggattacgacgttgtgatgtgggaaaaacatggcgtatttgcagtagattgcgatgcgatgcaggcattcgaccagattgatgtgttgaataaatctgctttgatctatattgcagccaagaacatgggcttcgaaccggatggtatgagtcaggaacagatgaaggaaatgactgttgctttcaatcttcctaaataaaataaaccaataaacaaccatgaatcgcattattttaaatgaaacttcttacttcggtgcaggctgccggagtgtaattgctgtagaagcagccagacgtggctttaagaaagctttttttgtaacggataaggatctgatcaagtttggtgtggctgccgaaatcattaaagtgtttgacgacaatcagataccttacgaactttatagtgatgtaaaagccaatcctactattgctaatgtacaaaacggagtggctgcttacaaagcttccggtgcagactttatcgttgctttgggcggcggatcttctattgacactgctaagggaatcggtatcgttgtgaataacccggattttgccgatgtgaagtctttggagggtgtggctgataccaagcataaagcggtacctactttcgcactgcctactactgccggaacggctgccgaagttactatcaattatgtgattatcgatgaagatgcacgtaagaagatggtgtgtgtagacccgaacgatattcctgctgtggctatcgtagatcctgaattgatgtactccatgccgaaggggctgactgctgcgacgggaatggatgccttgactcatgccatcgagagttatattactccgggtgcttgggctatgagtgatatgtttgaattgaaggcgattgaaatgattgcacagaatttgaaggcggctgtggataacggtaaggatgtggcggcccgcgaagcaatgtcgcaggcgcaatatatcgccggtatgggattctcgaatgtcggtctgggaattgttcactcgatggctcacccgttgggagctttctatgatacgcctcacggagtggcaaatgctttgctgttaccctacgtgatggaatacaatgctgaatctccggcggctccgaaatatattcatattgcgaaagcaatgggggtagatactgccggaatgagtgaggcagaaggagtgaaagcggcaatagaagcagtgaaggctctttcgttgagtatcggtatcccgcagaagttgcatgaaattaatgtgaaggaagaagatattcctgctttggcggtagcggctttcaatgatgtctgtacgggtggtaatcctcgtccgacttcagtagcggatattgaggctctgtatcacaaagcattttgattgataggagaaagcgtatgaaacgggaagcttttaagatgttcttgaaacccgggttcgagaaagaatatgagaaaaggcacgcagccatttggccggaactgaaaaaaatgttgtctgatggtggagtatatgattattctatctattgggataaagatacaaatattcttttcgcctgtcagaaaacaagaggagaagagtcctcgcaagatatgggagccaatccgattgtgcagaaatggtgggattatatggcggatatcatggaagtaaatgaggataattcgccggttacgattcctttgccggaggtcttccacatggattgattaaaaaaagagtgcgtcggttgtatacaatgcactctttttttgtacatttgtctgctgtggaaaacattaaagaaatcgtatgtaaggatatgggcatgaccgatgatacaagtttagggcttgaattcaagtatttaatagtaaatgacatggaccgtaagttcggtttatgggtgaatacagtcggctatcagtctatcccgcccgattctccttacccgttgaaagagcatccttccggctatttttttaatgcggaaaaaggcagggtgcttcgtgaataccagctagtttatattactaaaggacgcggcctgttctcatccgattctactccagaaaagcaggtttgtaaaggaaggttgatggtgttgtttcccggacagtggcatacgtatcgaccattgcggcagaccggttggacagaatactatatcggatttgaaggtccggcaatagatgcgattgtggctaattcttttttatcccaagaacagcaaatattggaggtgggaatcaatgaggagttggtatctttgttctcccgtgctcttgcggtggccgaagcggacaagatttccgcacaacagtatctttccggcattgtgttgcatataatcgggatgattctttctatctctaaaaacaaggtctttgagatgagcgatgttgaccagaagatagagcaggcaaagattataatgaacgagaatgtttcgggcaatgttgatccggaagaactggcgatgcggctgaatatcagttattcatggttccgcagggtgtttaaggaatataccggttatgcaccggccaaatattttcaagaattgaaactccgtaaggcaaagcaattgttggtaggtacttctcagtcagtaaaagagatttctttctttttaggtttccaatctactgagtacttcttttcattcttcaaaaaacggacggggcttactccgttggaataccgttcattcgggagggaagaatagaaccgaataaagtcagtaaagaagagccgtcataaaaaagaagaaccgcatttctgcgattcttctttttctttagttgcggagatccgactcgaacgaatgacctttgggttatgagcccaacgagctaccaactgctccactccgcgatgtttaacgggtgcaaaggtacggctttttttgaaacaaacaaataattcgctgaatatttttcgaataaatcatcacttttttcttattaggttgagaatgaacgaaataatgatgaaactttttcttagcacctattaatatacaaatgttaatattctctctgttttcttgtatggtctaaagaaaagaattacttttgctcaaaatattcagcaatgtgcaatttgtaacctatgaccgtatccaagacaaaagccaagttagtagatgtagcccgtcagctttttgcaaagatgggggtagaaaatacgactatgaacgatatcgctcttgcttctaaaaaagggagacgaacgctctatacttattttaaaagtaaggatgaaatctatttggctgttgtggaatcggaattggatattctgtcggatatgatgaagcgggtggccgagaaaaatatctcaccggacgagaaattgttggagatgatatatacccggttggacgcagtaaaagaggtcgtctatcgaaacggaacactgcgtgcttatttcttccgtgatatatggcgggtggaaaaagttcgcaagaagtttgatgcaaaggaagtccagctctttaaagccgttcttctggaaggacaggcaaaaggagttttccatattgacgatgtggagatgactgccgacttgatacattattgtgtgaaaggaattgaagttccttatattcgaggccatataggtgcacatctggatgaagatacaagaaatagatatgtgtccaacattgtgtttggcgcactgcatagaacagaaatttaattaaataacttttagtatgggattattagacggaaaaacagccattgtaaccggtgctgctcgcggtattggtaaggctatcgctcttaagtttgctgccgaaggcgcaaacatcgcatttactgaccttgtcattgacgaaaatgcagaaaatacagctaaagaattggaagcaatgggcgtgaaagccaaaggttacgcttctaacgcggctaactttgaagatactgcaaaggtcgttgaagaaatccacaaggacttcggacggatcgatatattggtaaacaatgccggtatcactcgtgacggtttgatgatgcgcatgagcgaacagcaatgggatatggtaatcaacgtgaacctgaagtctgcatttaacttcatccatgcttgtacacctatcatgatgcgtcaaaaagctggtagcattatcaatatggcctctgttgtaggtgttcacggaaatgcaggacaggctaactatgctgcttctaaagcaggtatgattgcattggctaagtctatcgcacaagagttgggttctcgcggcatccgtgccaacgctatcgctccgggattcatcctgacagacatgacagctgctctttctgacgaagtaagagctgaatgggcaaagaaaattcctttgcgtcgtggtggtactcctgaagatgtggcaaacatcgctaccttcctggcttctgatatgtcttcttatgtgtcaggtcaggtgattcaggtagatggtggtatgaatatgtaatcgaacagaatgactgttgtatacgaagacaaccatatcattgtagtcaacaagaccgcttccgagattgtccaggcagacaagacgggggatacgccgctttcggagactgtgaaacagtatctgaaagagaagtatcagaaacccggaaatgttttcctcggtgtgacacaccggctggaccgccccgtaagcggtcttgttatttttgccaaaacgggtaaggcgctgacaaggctcaacgaaatgtttcgcaccagtgaggtgaaaaagacttattgggcggttgtgaaaaatgctccgcaagaaccggaaggtgaactggtacattttcttgtacgtaatgaaaagcagaacaaaagttatgcatacgacaaggaagtgccgaacagcaagaaagcgattttgcattaccggttgatcggtcattcggagaattactatttgctcgaagtcgatttaaaaaccggacgtcatcatcagattcgttgtcagctggcaaaaatgggatgccctatcaagggagatttgaaatatggctctccacgctccaatccggatgggagcatttgtctgcatgcccggagagtacggttcatacatcctgtctcaaaagaactgatagagcttgaagctcctcttcccgaaggaaatttatggaaaggattcaccatagaggacacagagaaaacttattgaaaatcaaaatagaaagaattttatagctctgtataatttgtgttctccatggtgagaacttgccaaacgaaaaacgtatgaggcataaaaatcatttctgttgacgttcgtcaaactccagttcgacctttacaggaaaatgatccgaaggagtacgggcttgataagctttgatgtcgatttcttccgggcagtcgtttgcattctccttctcgccgtttcctactatactacggtaggtatctgtcagtatcccatatctttttacatgaaaagccggagatacgaacacatggtcgatacgacttttggtaaaactatttgggtcgaaactattgaaggttccgtttgtagcatagcggaaatcgcatttttcgtatgagtcgcagagcactcctttttccacaaaggcgttgtatgactggtgagtctggtcgacattgaagtcaccggttaagatagctggaagatttttgcctttaccgagctctttcatcttttcctgtacgagatacgcactttcaacacgtgcttttttgccgatatggtccatgtgtaaattgaagaaaaggaattcaaaaccggtatctttgcatttgaagtgaccccaactgcaaatacgcggtaacaccgcatcccaacctttgctcggcacatccggagtttccgacagccaaaaatcgcctttctctataatatcgaacttgtctgtacgatagaagatcgcggaatgttcgccttgaattttaccgtcatcacggcctacaccgatataatcataaccgggaagagcttctttcatatctttcagttggtgaaggaaacattcttgagttccgaaaatatcaaaatcatgatattgaaccattttggcgatgactgggtagcgttgtccccaaccgtttccgtggagcgaatcgttgccgttggcgtttcttaagttgtaagaagcaacggtgaatgtagtaggctgatagttgctttggcaaccgcagaagactatcgtcgtaacaagggtaattagtaaaagacttttaagtttcatgtttttatagtttgtttggtggataattcattgacctccaaaggtacaatattttatttaaaagaaagaaaggaaagcgcatcttttccggggggattatttattaaataataaaaaaaccatccccggaatagacgaaagtagggatggcttttttttgtagtgtgcttactattcttcggcagactatgttttgcatgttgttggcaaggttattccttgacaggcacagccggtttgtctttggatgcagtgtctgtgacaactgtatcattgacattggcggctaatgcaatcagtgatgcctttgcaggtgcgtcttctttagttacagtatcttttactactgtatcattgacaactgtcgcattgatttctgtcggggctgtcacagcttccgcagaactctgcgcctttacaaggaatgaaccaccacaaacaaacataaacattgctactactaatactaatttcttcataatcgtttgctttaatgataattagacatatgttttcaattctctctcttgtgttaaggaattggttattgctttttcgctaacgtctaattaaagatcaaagcgtgtgccaaaatagaagaatgtatggtaagtggttgataaatagagatatgtggaaatagaaccaatcaggatgttggggaagtgtgtatggggagtgtggaattattccacactccccgccacaaatcttttgtctggttatctattttacttcatccggccagggacaaggtttgccggtggcattgaaagcgggccgctgtgcgtctacttttcttagatagctgcccagctctttagaaagtttcttcacgatgtccggatgctgtgcactgagatcgttactttcgcctatatcatcagagatattgaacaactctttcttgcctgttccatagtaataaatcaatttccagtcactgttgcggaccgcgcaattgaagttgattccgggaccgtcatttccccagttgttcggcatattccagaaaaggctccggcctttggaaggattgcccgtctgtttcaacagagggacaaaactgataccgtctatcggctgaactgttttgtattttttgattcctgccatttcgaggatcgtggggtagaaatcttcgatcaacagatacttgtcacatttgcttcccggagctactactcccggccaactgacaatcatcggttcgcggataccgccttcataagtagaacctttaccactgttcaatggataattctgtgtatgcagcttgccgtcacgccatccggattcggatgcaagtcctccgttatcactcataaaaatgataatagtgttgttggcttctccattcttttccagccagttcattaaatcacctaaacttttatccattccttcaatcagtgtggcataagcagcttcatggtctgtcattccttttttcttgtacttctcatagaagcgcatatctttgttcaaaggaatgtggatggcatattgcgacatatacaaatagaaaggctgattatactttttcgctttatccagtgctttaatggcttccaacgtcaatgcttcagttacaaaggtttccgttccccaatatttctctaatccgggaacagacatcagtgataccgctttcccatttttggtatgtccgtagttctcttctcccaggtaactggcaagtccaccggccgcatgtccggcaatatttacctcgaatccccaatgatgcggatcttcccctggagtatctattgctccgaaatgggcttttccacaatgtatagtatgataaccgctgttctttagcagttgcacgaaggaggttcctacgaaagtatgattagtgccggacacttgacttactccattgtaattccagtcagggactgccagaatgctatctttacggtctgtcattgtattcttttgcagcgtccagttagttactcggtgacgtgcagcgttggttccggtgatgaggctgcaccgggtaggagaactgatactgttggcatacgcttgagtaaacatcattccctgtttggctaaccgctccatattgggggtctcgtacaattcgttatagtgtgtcttctgtgtccagaatgggagtgaagtatcctgccatcccatatcgtctaccataaagagaatgatatttggacgtttgtccgcgtgttctatttgcatattgctttgtgcttgcagattggttgctgcgagtggcacaaatacaaggggtaataatgtttttttattcatgggggcattttattctatggaatatgcattaatattaacaatatctggtaatgcgatagattcggttaaagataagttcgagcactacaaaaaggaatcatttctcaccgtgatgagaatacttgagaaaatgcaagaacgtaacttgttacaaatcaatattatataatttcaatttattatataaagtcttccgatcaatattcagtaattgcgctgctttgctcttattgtttcctgtttggcgtagtgcctccaaaatatgctctttttcagtctcttcattgcgtaatgctatgcttgtattgctggatgcaggagtttctaagagctcggttcccaattccaataaagtgatgaaactgctttgtgccaataaagtcgctcttttgactatgttcttcatttggcgcaaatttcccggccaatgataattcattaaagcttgtgatgcttttgtatcaaagccgatcagatgtttatccagctctttgtttgcctggtcgaggaagaagttggcaaaaagcaaaatatcctctttccgctctttcaagtcaggcattcgtagggtaaattcgttgatacgatgatagaggtcctcacggaatgtccccttttcgatggcttgctccagattctcgttcgttgcggatatcaaacgaatatctaccgaaatttcctgtgtagagccgaccggacgtatctttctctcttgcaaagcacggagcaattgtatctgtacttcataactgagatttccgatttcatctaaaaagatagtaccgccgttggctgcgacgaaagcgcctgtcttgtccgtcaacgctcctgtaaaggagcctttcacatgaccgaaaaattcggaagcagccagttctttggggatggaaccacaatctacagcaataaacggtttattgttccgcttgctgagttggtggatgcggtgtgctacatattcctttcctgttccgctcgaaccattgataagaacggacatattggtcggagctaccagacctacataattataaagttgtttggcggcgtcactctctccttccagataagagtgctgcccttcgtttgtaacttttgaagtagcttgcgatgaggaaacttgtgatggagaatcttgtaaagcttcagatatcttcttcagtaattctcccggattcacgggtttggcaatataatcccgtgctccgagtttcattgccagtacagcggactggatatccgcataaccagtcataatgatcagaggaatggcttttccctgttcattcatccatttcagtaaatcgatgccttcatgatcgggcaaccgcagatctgataatatcaaatctacagtttggctttcgatatgcttccgggcacgtgcaatggtacttactgatgatacttcaaatccttttttgcctagccaggttttgagcatcattccaaaagttatatcatcttcaacgatcaatatggatctcatcatgtcaggttttgattcttttaagtcacaaaggtaagaggatttaggcgaaagtggtatatttgcaaacttaaattaaataaaagcattatgaaaaagattgtattgatattattaaccatatcgttttgcggacttattgcctgcaagaccggaactaaaaaaggagaagacatggataaagaaacattggtaaagattgagacaactgcgggagacatcaaagtgaagttgtataatgagactcccaaacatcgtgataattttattaaattggtgaaagacggaatgtatgaaggtacactgtttcatcgcgttatcaaagattttatgattcaggcgggtgacccggattcgaagaatgctccgaagggcaagatgttgggtgccggtgatgtaggttacaccattccggcagaatttgtatatccgaaattcttccataagaaaggcgctctttcggcggcccgtcaaggagataatgtgaacccgaagaaagagtcttccggctgtcagttctatatcgtgacaggaaaagtctacaatgattctacgttgttaagtatggagagccagatgaatgagaataagattaatgttattttcaatacattggcgcagaagcacatgaaagaaatttataagatgcggaaagcaaacgatgaagacgggctttatgacttgcaggaaaaactgtttgcagaagcacaggagatggctgccaagcaaccggaatttcatttcactccggagcagattgaagcatatactacggtaggtggtaccccgcatctggatggtgagtataccgtattcggtgaagtagtggaagggatggatgtagtagacaaaatccagcaggtaaaaaccgaccgtagcgaccgtcccgaagaagatgtgaagataataaaagcgaccatacttgactaaatgatatgaaaatcaacaggcatattcttgacaatggattgcgtctggtgcattcgcaggatgaaagtacgcagatggtagcccttaatatattatataaggtgggagctcgtgatgagcatcccgaacataccggtttcgcgcatttgtttgaacatttgatgttcggcggctcggtcaacattcccgattatgatatgccgctccaattggcgggtggggagaataatgcctggacgaataatgatattaccaactattacctcactgttccccgccagaatgtggaaaccggcttttggctggagtcagaccgtatgctgagcctcgatttcagcgaacggagtctggaagtgcaacggggagtggtaatggaagagtttaagcagcgttgcctgaatcagccttatggagaggtagggcatctcctgaggccattggcttaccggtcgcacccttaccaatggcctaccatcggtaaggaactgtcgcatatcgccaatgcaacgttggaggaggtgaaagcattctttttccgattttatgctccgaataatgcgatactggctgtcaccggcaacatctctttcgaggaggcagtgacactgacagagaaatggttcggccctattccccatcgggaggttcctcaacggaacttgccgcaggaaccggaacagacggaagaacgacgattaacggtagagcggaatgttcctcttgatgcgttgttcatgggatatcatatgtgtgaccatcatcaccctgattactatgcctttgatatcctttcggatatattaagcaacgggcgttccagccgcctgaaccagcgtctcgtacaagaaaggcagttattctcaagtattgacgcttatatatccggcagtgtagatgcgggtttgttccatattgccggaaagccgtcggcaggcgtggcactggaacaggcggaagctgccgttcgggaagaattggatcgcctgcaacaggaacttgtcagtgagcaggagttggaaaaagtaaagaacaaatttgagtctactcagatattcggtaatattaattatttgaatgtagcgactaatcttgcctggttcgaactgctcggacgggcggaaagcatggagcgggaggtggaacgttatcgttccgtcactgcgggacagttgcaggctgtagcccaatcggctttccggcgggagaacggggttatactctattataaaagtaaatgagaaatatttatagaacatacagagagcattacaaggcattattctaccttggacttcctattgtcatcggacagataggagtgatcatacttggattcgcagatacgttgatgatcggtcaccatagcacgatagagttgggcgcggcttctttcgtgaataatgtgtttaatctggctattattttcagtacgggattctcgtacgggttgacacctatcgtgggagggctgtatggaactcaccaatttgcccctgccggacaggcattgcgcaatagtttgctggccaatctgatggttgcgcttctgctgactatatgtatgacgctgttattcctgaatatagagcgtctcggtcaaccggaggaattgattcctctgattaaaccttattatctggttttacttgcttctttggtgtttgttatgcttttcaatggcttcaagcaatttacggatggaattacagatactaaaacagccatgtggatcttgcttggcggaaatgtattgaacatcatcggaaactatattctgatttatggaaagctcggctttcctgaattgggattgttgggagcaggtatcagtactctgttttcacgtatagtgatggtcgttgtctttgtaatcatctttatgcgtagtccgcgcttcattcgttataaggtcggctttttccgtttgggatggtcgcgtgctgttttcagccgtttgaacggattaggatggccggttgcctttcagatgggaatggagacggcttccttcagtctgagtgccatcatgattggctggttggggacgattgcgttagcttcccatcaagtcatgttggcaatttcacaatttacttttatgatgtactacgggatgggagctgccgttgctgtccgggtcagtaacttcaatggtcaggatgatatggtgaatgtgcgtcgttccgcctatgccggtttccatctgatgatggcattgggtgtcgtgttgtctttcattgtttttctttgtcggaattatctgggaggttggtttaccgacagttctgaagttgccgctatggttacttcgttaatatttcctttccttgtctaccagtttggcgacggcttgcagatcacttttgccaacgctttgcgtggaattgcagacgtaaaactgatgatggtcatcgcttttatcgcttatttcattatctcgttgcccgtaggctatttttgcggtttcgtgatgggatggggtgttgtaggcgtatggatggcgttcccttttggattgacaagtgcagggctgatgctttggtggcgtttccactacatgacgaaacagcctgccctccgacaataacttgtaattcgttgttcctatggcttcctaccgttctacaaaactcaaaataaccattggttacactttgctactggctattcttcttttctcgttggtgtttgtgcatcgtgagatggaagcgttatcggctgcggacaaccagcagaatttgcgtacggatagcttgttggcccttctccatgagaaagaccggaatacaattcaaatgttacgagtgctgagcgaagcgaacgatagccttctttctgcatcggagattaaggaaattatttccgaacaggattccgtcattacctaccaacgggtacaacatcgtgtcataaccaaacgcgattctctgctgactgctccgaagaagaaaggtttcttcaagaggttagcggaagtatttgtcccttccaaacaggatagtgccgtacttgtcaacacttctttggaggtagctacggatacgattctggaacctgccacttctaaggattccttgcagcaaaaaatccgtatggctacggaggaaaaacgtttgcaacggaaaaagaccatccggcgtaccagtacgaagtatcagcggatgaatacacagttgactgcaagaatggatagcttgataaagggttatgaggaagaaatgactcagcgtgcactccaggatgcggagcagcaacaagcagtaaggatgcgttcggcacgtactatttcgggaatcgctattggggcggtgtttctgtctgcctttttcttgatattgatcatacgcgatatatctcggagcaaccgctatcgtcgacaactggaggaagccaacaagcgggcggaggatttgcttgtcgcccgtgaaaagttaatgcttgccattactcatgactttaaagcgccgttaggctctattatggggtataccgaactgctatcccggttgactcgggatgaacggcagcgtttctatcttgaaaatatgaagagttcttcggaacatctcttgaagttagtcagtgacctgctcgattttcatcggctcgaccttaataaagcggaggtgaatcgcgtcacctttaatccttcgcagctatttgatgaaatttatattagttttgagcctttgactgccgccaaaggattgactttacaaagtaatgtcgcttccgatttgaatgggagatttattagtgaccctttgcgtctccgtcagattgtgaacaaccttttatccaatgccgttaagttcactcaaaaaggtaagataacattgacggctacatacgactcttcaaagttgacaatagccatcgcagataccggaaaagggatggctccgtcagaccgggaacgcatctttcaggagtttactcgtttgtccggtgcacaaggtgaagaggggttcgggctcggattgtccatcgtgaagaaactggtaactttactcgaaggagaaattgatgtgcaaagcacaccgggagaaggaagttgctttacggtgattcttcctctttatccggtggggaaatcggtaacggagggtgaactctcggaaagtgataaaggggaatctatccaagagccagctaccattcttccgatgaaggtgatccgtgttcttttgattgatgacgataaaatccaactcagcttgacggcagctatgctgaaacagcacggcattgatgctgtttgttgcgagcaattggaggaacttatagaacaacttcgcacttctgtttttgatgtattactgaccgatatacaaatgccggccatcaatggttttgatttggtgaaactacttcgtgcttccaatattccacaggcaaaaacgatccccgtgattgctgttactgctcgtagtgagatggataaggcggcgttgtacgaacatggatttgccggatgtctgcataaaccatttacggtaaaggaattgttgcagacgatcaatgaaggacaattggttgcggatgaggcgcatatcacagaagatatggggagcggattgatgaatttctccgcattgacagtttattcggaggacgacccggaggcggcgtgttccattattgagacttttatcgaagaaactgagaaaaatattgatatagtacaacaagccttagacaatgaagatacggacggaatagctgctatggctcataaacttcttccgcttttcacactgattggcgcatccgaaacaattgctcctttaaaatatttggaaagttgtcgtggagagatgttcgttgacgagataaagcaaacaacacttacagtgctggcaacggttccgcatataattagtgaggcaaaagagtatctttcttatcgttatccaaaccttttctcaaaataatttgtttactttgtgtcttcaatttacactgacacgctttgcatgaaacgaaaatggatacgatgggtaagctggatattgcttactccaataatactctttgtaatactgatggtattactttatattcctcccgtacaaaatcttttacgccgggaagtgaccgcatacgcttctgaagcaaccggtatgcagattcaggtggaacggattgaccttcgttttccgctcaatctgttagttcgtggtgtagaagtcattcaacagccggatactttgttgtctttagagagcttgaatgtgcgggtgcaggcgtggccacttatcaaaggaaaagtagaagtcgatgaagttacactaaatcaggttgcagtcaattccgcaggtctgatagagggaatgaagataaaaggtgtcttgggacgtttctttctgcagagtcatggggtggatttatccaatgaaatagcgattattaatcaggtcgatttatcagacacccatgtccaattggtaatgaacgacaccacgaccgctcctaaagacacgaccgcttccgctcctgtcaattggaaagtagaccttcatcagttgaatttgggaaatgtgtcattcagtatgcagcttccggctgattccatgcgtatggcagcctacatcggtgaagcgtctgtaaatgatgcgcaagcggatctgaagaatcagttttatagcttgaaacaattcctgttgtcgggaggctctgccaattatgataccggagctgctaaaccggtcgaaggcttcgatgcttctcatattgcggtccgtgatatccggatcggtttggactccttattatataaaggtaggaatatgaatgccgtgctccgtgaattttcaatgaatgaacgttcgggactgagcattacctcgttggcgggcagggtttattctaatgattcaattatttgtgttccgggcttaaagctgcagactcctcattctgaaattgatttgtctgcccatacgtattgggaacttgtcaacatccctactacgggacgtttgtccgccaatctcaacgcatacatcggtaaagaggatgttatgctgtttacgggtgggctgccggatagtttcaaagaagcctatcctttccgtcctcttgttattcgtgcgggtacggacggtaatctgaaagagatgcagatttcgcgctttacggtagatttgccgggagcattttctttagagggtggtgggcttcttgaaaatctggcggacagtatcacgcgctcgggaacggtcggggtgaagatgactacccagaatctgaacttcctgactgctttgtccggtgaggctcccaatgggactattgtaattcccgatagtatggatctggttgcgaaggttgatataaacggtcctgcatataaggccaatttgaaactgagagaaggacagggtactatagatatggacgcggcattgaatacgctcaccgaggtctacaaggcagacttaaaaataaacaaccttcaactgcataatttcctaccgaaagattcaatttatgaactttcactttcggctgacgctgaagggcgaggactggatgtgacgtcctatcgttcttttgccaaattgaatctgtcgttagatcagcttcattatgcccaatatcatctctcgaatgttgatttgactggagctttgaaaggggcattggtaacagcccgtctggccagtgacaatgctttgctgaagatgacgactgaggctgaatataacttggcacacagttatcccgatggaaaagtgacaatggatgtcactcaattggatttgcatgagttgggattaatgccgcagccgatgaaacatccgcttgcttttaacttttctgcggaagcccgccagaatcgggtgtttacccatttggtgtccggagatatgaaactcaacttgagtgcacgttccggggtggaaccgttgattcggcagtctactcattttgtggatgtgctgatgagacaaattgatgaaaaagcattggaccatgccgaattgcgtgaagccttgcccactgctatactctctttctctgcaggtaaagagaatccgttagcctatttcctggctactcagaacatatcctatcaggatgcatccatgaagtttggaaccgctccggactggggtattaatggtaaggcagccattcatacattgaaggtcgatactttgcaactggataccatattctttactgtcaagcaagatactacctccatgaagctgcgtgccggagtgattaacggaccgaagaatccgcagttctctttctcgactgctattacgggagaaattcgtgaccgggatgcggagttgctggtcgattataaaaacgaaaaaggagaaacaggcgtactgttgggtgtcaacgcccgtcctttatttgaaggacacggaaaaggcaacggtattgcttttaccttaatcccggaaaacccgattatcgctttccagaaattccatttcaatgagaagcataactggatctatctgcacaagaatatgcgtgtatatgccaatgtggatatgtgggatgatgaagggatgggtttccgtattcattccgttccgggagataccgtgtctttacagaatatcgatgttgaaatccggagaatccgtttggcggagcttagcagtgtacttccctatttcccggagataaccggactgttctctgcggaagctcattatgtacagacggaaaaggaccttcaactgtctgcggagttgtctatcgatgagttaacatacgaacggcaacgtattggagatgttacgctgggggctacatggctaccgggcgagcagggaaagcagtatctgaatgcgtacttgaatcacgaccaagcggaagtattgctggcggatggtaagttgatacctaccgggacggggaaagacagcttggaggtgaatatggagctggatcatttcccgcttcgggtagctaatgtgtttgttcccgatcagatggtcactttatcgggcgatttggatggtaatctgaaaataacgggcagtaccgaacaacctctgattaacggagaactgtcattggatagtgtagctgttctttcccgacagtatggtgctcgttttatgttcgataatcgtccggtgcagataaataataaccgtctgttatttgataaattcgcaatttacactacatcgaaaaatccgtttacgattgatggctatgtagatttccgcgatatgagtcgtccgatggcaaatctgaatatgcttgcgcagaattatacacttctggatgctaagcgtacccgtgaaagtttggtttatggaaaggtatttgccgatttccgtgcaacagtaaagggacctttggatggattgaatatgcggggaaacatcagtctgctgggtaatacagatgtttcgtatatactgacagactcaccgttgacagtacaggatcgtctgggtagtttggtcacttttacttcgtttagcgatactactaccgttgtccgtcaggaagtgccgacagtttctttaggcggtctggacatggttatgatggttcatattgatccttccgtccgtttgaaagtagatttggatgcgagcaatgacaatcgtatcgaactggaagggggaggtgacctttccatgaaatatactccgcagggtgacttgaccctgacaggacgttataccttgagcggtggtttgatgaaatatgctttgccggtgattgcagccaaagagtttgctatagataacggcagttacgtagaatggacaggcaatccgatggacccgatgttgaactttaaggcgaccgaccgtatccgcgcttccgtatccgaaggagagaatggtggaacacgtacggttaatttcgatgtttccattgtaatcaagaaccggttggatgatctttcgtttgcatttgatgtgtcggcccccgaagacgcgaccatacaaaatgaacttacagctatgggggcggaagaacgtggcaagcaggcgctttatatcatggtgatgaaaacctatctcggtaccggaccgattggcggtggaggtggtggagtaggcaagctgaatatggggtctgccttgaattccgtgttgagtagtcagattaactcgttgatgggcaatttgaagaatgcaagtgtctcggtgggtatcgaagatcatgatctttcagatactggtggtaagcgtacggattacagcttccgttactcgcaacgtctcttcaataaccggttccagatcgttattggcggtaaggtatctacgggtgagaatgcgacgaataatgccgagtcatttatcgacaatatctctttggaataccgtctggataggacaggaacccgctatgtccgtctgttttacgataagaactatgagagtgtgctcgaaggcgagattacggagaccggagtcggtctggtacttcgcaagaaactggataaactcagtgaactgttcatctttaagaaaaagaagtaagaatgaaaggaatatatagtaacatattaacaggctgtctgattggtatcatgttgttttcggggtgttcggtgacgaagcatttgcccgaagacgaaatactctataccgggaataaaacggttattcagaataaatcgaacacttcggtaggtcagacggcattgaccgagatagaagcggcgcttgacaaggctccgagtacgaaaattctgtttctgcccattccttttaagatgtggatgtacaatgattttgtgaagtacaagaaaggattcgggaaatggatgttcaaccgttttgcagccaatcctcctgtttttatttctactgtcaatccggaggtgcgcatcaaagtcgccaccaatctgttgcatgattatggctatttcaatggaaaagtaacttacgaaacattggcggataagaaggatagcttgaaagccggtattctttacacggtggatatgaagaatccctatttcatagatacggtgtattatgagcgtttcactccgcagacattgcggattatggagcggggacgcaggtattcctatataagtcccggagaacaattcaatgttgtggatctggatgacgagcgtacacgtatcagtacgttgttgcgtaaccggggatacttctatttccgtcccgactatatgacttatcaggcggataccactttagtgcccggcgggcatatcagcctccggatgattcccgtacccggtttgcctgctgctgcgcaacgtccttattatgtaggcaatggctctgtttatctgtttggaaagaatggagaatccccgaatgacagcatgatgtataagaacctgaatattcactattataagaagttgcaggttcgtcccaatatgctttatcgttggttgaattatcaacagtttgtacgtaatgcacagatgcgtgcttccaatcgtactaggctttacagtcaatacaggcaagagcaggttcaggaaaagttaagccagttgggtatattcagctatttggatatacaatatgctcctaaggacacgacagcagtttgtgatacgctgaatgtgagtgtacaagccacttttgccaagccactggatgccgagttggagttgaacgtagtaactaagagcaacgatcagaccggtcccggtgctgcttttggtgttacccgtaacaacgttttcggtggtggagaaagctggaatgtaaagcttaaaggctcttatgagtggcagactggaggtggagagaaaagttctttgatgaacagttgggagatgggactttccacatcactgacttttcccagagtggtgttcccacgttggggcaaaatggaatttgactttccggcaaccacaactttccggttgtatatcgatcagttgaaccgtgcgagatattataaattgttgtcattcggtggaaatgcgacatatgatttccagccgacacgtataagccgtcatagtatcactcctttcaaattgacattcaacgtcctgcaacatcagtcggaagagtttaaggagatcgctcaggagaatccggcattgtatatcagtttgaaagaccagtttattcctgctatggaatacacgtatacgtatgacaatgcttcgacgcggagaataaagaatcctatctggtggcaatctacagtgacttctgccggaaatctgacctcagtgatctatcgtgctttcggtcagccttttaataaagaaaataaacgattgctgaatgttccttttgcacaattcgtgaagttgaatacggaattccgccatttatggaatattgataagaataacagaatagcgtcccgtgtggcattgggagcacttttctcttatggaaatgctacgatagctccttatagcgaacagttttatgtcggaggtgctaacagtatccgtgcttttacggtgcgtagcataggtcccggtggatatcatccggtggaaagtcgttattcttatctcgatcagacaggtacattccgctttgaggcaaatgtggaatatcgtttccgtatttataaaagtatttggggggccactttcctggatgcgggaaatgtctggctgatgcgtaaagatgaggctcgtccgaattcacaactcgaactgaagacttttccgaaacagattgctttgggtacaggtgtcggtttccgttatgatatggatattcttgtgttccgtctcgatttcggtgtacctttgcatctgccttacgatacggatagaagtgggtattacaatgttaccggagcctttatgaaaaatttgggaatacattttgctatcggttatcccttctaatgaatgacttttgtacgattttggtaaataatgattgataattgtcctgtcggattcaactatttttgtacttttgcaacgaaatctgatgccgttgacatcactaaccttttaatattacacaatttatgaaaccaactttattcttattggcagccggtatgggcagccgctatggaggcttgaaacaattggacggtctggggcctaatggcgaaactattatggattattcaatctatgacgctattaatgccggattcggcaaacttgtatttgtaatccgcaaagactttgaacaggatttccgtgagaaaattatttccaaatatgaaggtcatattccttgcgagcttgtatttcaagcgttggatgctcttcccgaaggttttacttgtccggcagaccgtacaaaaccctggggtactaaccatgcggtaatgatgggtgccgatgtgattaaagaaccgtttgcggtaattaactgtgatgatttttatggtcgcgattcttttcaggtgatgggtaaatatctggctgctcttcccgaaggttcgaaaaatgtttattcaatggtaggcttccgcgtaggaaataccttgagcgaaagcggtacggtatctcgtggaatctgtagcacagatgcgaaaggattgctgacttctgttgtagaacgtacgaagattcaacgcttggacggtgaagtgaaatatatcgatgataatggtgaatggactgctacccccgacacaactccggtaagtatgaatttctggggtttcactcccgattacttcgcttacagcgaggagttctttaaaactttcctgagcgatccgaagaacatggaaaatctgaagagcgaattcttcattccattgatggtggataaattgattaatgacggaaccgctactgttgaagtgttggatactactagcaaatggttcggtgttacttatccggaagatcgccaaagcgtagtagacaagattcaggcattggtagatgccggtgaatatcctgctaaattgttctaaagagggacttagattaagataggaagcagtcattcgttcagaatggctgcttttttgtttttgataacggatgatactaacatttatacaataattattcattatctttgcagtccaaaatcttataaatcagagacagaagtgatttcagtagaaggattatcagtagaatttaatgcgacacccctttttgaggatgtcagttatgttatcaataagaaagaccgcattgcgttagtcggcaagaatggtgcgggcaaatcgaccatgttgaagatattggcaggtttacaatcgccgacacatggagttgtagctactccgaaagatgtaactatcggatatttgcctcaggtcatgattctttccgacaaccggacggtgatgggagaagcagaacaggcattcgaacatatttttgaacttcaggcgaagttggaacgaatgaatcaggaactggctgaacggacagactatgattcggaagaataccatcagttgatagaccgtttcacgcatgagaacgaccgcttcctaatgatggggggcacgaactatcaggcggaaatcgaacggacacttctcggactgggattcagccgtgaggattttgatcgtcctacttcagagttttccggtggttggcgtatgcgtatcgaattggcaaaattgttgttgcgccgtccggatgtgctgctgctcgacgagccgaccaatcatcttgatatcgaaagtatccaatggctggaaaatttcctggcaattcgtgccaatgctgtcgtactagtcagccatgaccgcgctttcttgaacaacgtaaccacacgtactatcgaaattacctgtggacagatttatgattacaaagtgaagtatgacgaatttgttgtcttgcgcaaggaacgtcgcgaacagcagctccgcgcttacgagaatcaacagaaacagatacaggatacggaagatttcattgaacgcttccgctataaagcaactaaagccgtgcaggtacaaagccgcatcaagcaattggaaaagatagagcgtgttgaagtggacgaagaagacaactcctcgcttcgcttgaaatttcctcctgccagccgtagcggaaactatccggtgatttgcgaagacgtgcgcaaagcgtatggtaatcatgttgtttttcatgatgtaaacctcactatcaatcggggagagaaagtagcttttgtcggtaagaacggtgaaggtaaatctacattggtgaaatgtataatgggtgagattgactttgacggcaaactgaccatcggtcataatgttcagatcggttattttgcacagaatcaggcacagatgttggatgaaaatctgacggtgtttgataccatagaccgggtagcaacgggagatatccgtttgaagatacgggatattttgggtgccttcatgtttggcggcgaagcttcggacaagaaagtcaaagtcctttccggtggagaacgtacccgattggcaatgatcaaacttcttcttgaacctgtaaacttcctgattcttgacgaaccgaccaatcacttggatatgcgttcaaaggatgtgttgaaagaagcgatccgtgaatttgacggcacagtcattcttgtcagtcacgaccgtgattttttggacggacttgcgactaaagtatatgagttcggtggaggaatggtgaaagagcatctcggaggtatttatgaatttctgcaaaagaaaaagatagatagcctgaatgaacttcaaaaaggcaccggattgtctgcttctcctacggcaacagccaaaggaaatggagaacaggaagctgtgcaaccttcggaaaacaaactttcttatgaggcacagaaagagttgaataagaagattaagaaactcgaacgtcaggtagcggactgtgaagcctcgatagaagagacggaagccgcgattgccattgtggaagagaagatggcgactccggaaggggcttcggatatgcagctatatgaacgccatcagaaactgaaacaacagttggacacaatcgttgaagagtgggaacgggtgtcgatggaactggaagaagtgaaaggctagggccttccttcgcataacatgataattctataatatattatattgagtatgaaagtaaccaagtatttaccaattcttgcggtatgccttatgacaacaggatgtaacagtaagaaagaggccgtactgacgtccggtatcgaccttgctaatctggataccacggctgtgccgggtacaagtttttatcaatatgcgtgtggcggttgggtgaaagctcacccgttgactgacgaatattcccgtttcggaacattcgatatgttgcgtgagaacagccgtgaacaattgaaatccctgattgccgaactggccgcaaagacggacaatgctccgggaagcgctgctcagaaagttggcgacctttacaacatcgcaatggacagtgtgaagttgaaccaggagggagtagctccgattaaagacgaattggccgctatcgatgcgctgaaagacaagaacgaaatctacgcatacattgccgaaagtcagaagaaaggtatacggccttactttacgatgtttgtcggtgcggatgatatgaacagttcgatgaatatagtacagacctatcaggggggtatcggaatgggacaacgcgattattatctggaagaagacgaacagactactaacatccgtaacaaatatcaggaacacatcgccaagatgttccggttggcaggttatgatgaggctactgcacagaaagcggtaaaagctgtaatgaacattgaaacccgtttggctaaagcggcccgttcacaagtggaattgcgtgatcctcatgccaattataataagatggatatggaaacgctgaaaaagaacatcccgactttcgactgggatacttatttcgctgtttcaggtttgaaagacctgaaggaagtgaacataggtcagcctgccgctatgaaagaagttgccgatgtgattaacactgtatcattggacgatcagaaattgtacttgcaatggggcttgatagatgctgccgcttcatatcttagcgatgactttgaagctcagaacttcgatttttatagtaggacgatgtccggcaagaaagaaatgcagcctcgttggaagcgttcggtaagtacggtagacgctgttcttggtgaagtggtaggacagatgtatgtagaaaaatactttccggctgctgcaaaagagcgtatggttaccttagtgaagaatctgcaaacttctttgggcgaacgtatcaaggcgctggaatggatgagcgaaccgactaaggtgaaagcattggagaaactggatgcttttcatgtaaagatcggttatccggacaagtggaaagattattcggctttggagattaagaatgattcttattgggcgaatatcgagcgtgccagtcaatgggattacaatgaaatgattgccaaagccggtcagccggtagataaggatgaatggttgatgacaccgcagactgttaatgcttattacaatcctactaccaatgagatctgcttccctgcagctatcctgcagccgccattcttcgatatgaacgccgatgatgcaatgaattacggtgctatcggagtcgttatcgggcatgagatgacacatggattcgatgatcaaggacgtcaatatgacaaagacggaaacctgaaagagtggtggacggaagaggatgctgaaaagttcaaggaacgtgcccaagtaatggtgaacttttttgacagtatcgaagtagctcccggtgtgcatgctaacggtcagttgactttgggtgaaaatattgccgatcatggcggtctgcaagtttctttccaggctttcaagaacgcgacagctaatgcaccgcttgaaacagtagacggatttactcccgaacaacgtttcttccttgcttatgctaatgtatgggcaggaaatatccgtccggaagaaattctccgattgacaaaactcgatcctcactcattaggcaagtggcgtgtagacggtgcacttcctcatattggaaattggtacgaagcattcaatattactgagcaggatcctatgttcgtggctaaagacaaacgggtgtccatctggtaatagtttttgaacaaaaatatactttgcgaagaagcgttgattttctgtttgggagagtcaacgcttttttttattaattcacaccttatttattacgtacgataaacaatatttcgtaactttgcacaccaaatacttaataagcaattcaatgtcagagtctaaaagaataaaaactgcattggtatctgtataccacaaagaaggtttggatgaaattattaccaaacttcatgaagaaggagtagagttcttgtcaacaggaggaactcgtcagtttattgaatcattgggatatccttgtaaggcagtggaagatttgaccacttacccttctattctcggtggtcgggtaaagacattacatccgaaaatattcggaggtattctttgtcgtcgcgggttggagcaagatctgcaacagattgaaaagtatgaaatccctgaaatagatttagtcattgttgacctgtatccgtttgaagctactgtagcttccggtgcatccgaagcagatattattgagaaaatcgatataggcggaatctctctgattcgtgccgcagccaagaactacaacgatgtaattatcgttgcttctcaggctcaatacaaaccgttgttggacatgttgatggagcacggtgccacttcctcactcgaagaacgtcgttggatggcaaaagaagcgtttgccgtttcttcccactatgattcagcgatcttcaattattttgatgcaggcgaaggttctgctttccgttgctcggtaaatagccaaaaacaacttcgttatggtgagaacccgcatcagaagggctatttctacggaaatctggaagcgatgttcgaccaaattcacggaaaggaaatctcttataataatcttctcgatatcaacgctgccgttgatttgattgatgaatttgacgacctcactttcgctattctgaaacataataacgcttgcggtctagcttcacggtctactatgctggatgcatggaaagatgcattggccggtgatcctgtttccgctttcggaggcgtgttgattacaaatggggttgttgacaaagaaacagccgaagaaatcaacaagattttctttgaagtgattatcgcaccggattatgatgtggacgcactcgaaatccttggacagaaaaagaaccgcatcatcctcgttcgcaaggaagccaaattgccgaagaagcaattccgtgctttgctgaatggtgtattggtgcaggataaagatactaacattgaaacggtagccgacctcaaaaccgtaacagacaaggctcctactccggaagaggtggaagatatgttgtttgctaacaagattgtgaagaacagtaagtcaaacgctattgtattggcaaaaggcaagcagcttctcgcaagcggtgtcggacagacctcacgtgtagatgcattgaaacaagcaattgaaaaagctaagtcattcggattcgacttgaatggcgcggtgatggcttcggatgccttcttccctttccccgattgtgtggaaattgcggataaggaaggtattacggcagtaatccaaccgggcggctcggtaaaagatgatttgtcttttgcttattgcaatgagcatggcatggcgatggttactaccggtatccgtcattttaaacactaaaataataattaagaatgggattgttctcttttacacaagaaatagcgatggacttgggtacagccaataccatcatcatcacgaacgggaaaatcgtggtggatgagccttcggttgtggctttggaccgtcgtacggataagatgattgccgtgggggaaaaggcgaaattgatgcacgaaaagacccacgaaaatatacgcactatccgtccgttgagagatggtgtgattgccgacttctacgcttgcgagcagatgatgcgcggtttgattaagcgggtgaatacacgcaatcacttattctcaccctctcttcgtatggtgatcggtgttccttcgggtagtacggaagttgaactccgtgccgttcgtgactctgccgaacatgccggcggacgggatgtctatctgatcttcgaaccgatggctgcggctattggtatcggcattgatgtagaggctccggaagggaatatgattgtggacataggtggtggttctacggaaattgccgttatctctttgggaggtattgtttccaacaactccatccgtgtggcgggtgatgatctgacggaagacatccgtgaatacatgagccgtcagcataacgtgaaagtcagcgaacgtatggcggaacgtatcaagataaatgtgggcgctgccttaaccgaattgggtgaaggagctccggaagattatatcgttcacggtcctaaccgtatcacggctcttccgatggaggtgcctgtatgctatcaggaagtggctcactgtctggaaaaatcaatctcgaaaatagaaacagctatcttgagtgcgttggaaagtacacctcctgaactttatgctgatattgtgcacaacggtatctatctttccggtggtggcgcattgcttcgtgggttggataagcgactgactgataagatcaatattcctttccacattgcagaagatcctttgcacgctgtagctaaaggcacgggagttgcattaaagaatgtagatcgtttctctttcttaatgagataactcagggatgcggaatttaataaacttccttctgaaatacaattactggttcctctttatcttattagaggtagccagttttgttttgttatttcggttcaaccgttatcagcagagtgcttttttcacttctgccaatacggttgtgggggcggtttatgatgtgtcgggaggcatttcctcttactttcatttgaaatcggtcaatgaggatttactggaccggaatatgttgctcgaacagcagatctccaatctggagaaagcgttgaaagaacgccaggtggactctattaccattaacagtgtccggcagatgcctcaaagtgactatcagctgttcaaggctcatgtgataaaaaacagtctgacactgcccgataactatatcacgctcgacaaaggttcttcctccggcattcgctctgagatgggagtgatagacggtaacggaattgtaggtatcgtgtatgaaacttctccatcttattcggtggtgatttctgtactgaacagcaagtccaatataagttgcaagattatcggcagtgattatttcggctatctgaaatgggaacgtggagattcgcgttacgcttatctgaaagacctgccccgtcatgcggaattcaatttgggcgataccgtagtgaccagcggattctcgaccgtattcccggaaggtattatggtaggtacggtggatgatatgtccgactctaatgacgggttgtcctacctgctgaaaatcaagctggctaccgatttcggaaagctcggtgatgtccgtgtgatagcccggaatgggcaggaagagcagaagaaacttgaaaataaggtaacaaaagaatgattatcacctatatacatagaatcggatggtttatcggcttggtgcttcttcaagtgcttatcctgaataatgtccatatagcaggttatgccactccttttctctatatttattttatcctaaagtttgactccggcacttcgcggaatgagttgatgttgtgggctttctttttcggactgactatcgacgtatttgctgatactccgggaatgaatgcggctgcaacggtgctgcttgcttttctccgtccttctttactgcgactgttcacacctcgcgataatctggatagcttcatcccatctttcaagacgatagggattactccttttcttaaatatacgactgcaagtgtttttgtacatagtctggcgttactctccattgagttcttctcgttttccagcatttggctgttgctgctgcgggtgttactttgcaccattctgactgtaacctgtattgtagctgttgaaggcataaggaagtaaaatggcaaaagattatagattagagaaacgtaaatttgttatcggaggcattgccctgtctattgtcttgatttatctggtacggcttttcgtattgcagatcacaacagatgactataagaagaatgctgacagtaatgcttttctgaataaaatccaatatccttcgcgtggagcgatttacgaccggaccgggaaattgttggtattcaatcagcctgcatacgacatttcgattgttccgaaggaagtcgagaatctagatacgctcgacttgtgccagtcgttgaatattacccgtgcccaattcttgaagattatgagcgatatgaaagaccgtcgccgcaatccgggttattcccgctataccaaccagttgtttatgtcgcaactttcggcggaagaatgtggtgtctttcaggaaaagctgtttaagtttcgtggcttttatatccaacggcgtactatccgtcaatattcttacaatgcggctgcccatgcgttaggcgacattggagaggtgtctgccaaagagatggaagcggatgaagacggatactacattcgcggtgattatgtcggaaagttgggtgtggagaaatcgtatgagaagtatttgcgtggagaaaaaggtattgaaatcctgcttcgtgatgcacatggccgtattcagggacactatatggatggggcctacgaccgtccctctgttcccggcaagaacctgacattgagtctggatattgatttgcagattttaggcgaacgcctgctgaagaacaagattggcagtattgtagctatcgagccggaaaccggcgaaatcctttgtctggtatcttccccgaactacgatccgcatttgatgatcggtcgtcagcgtggtaagaatcatctgatgttgcaacgcgacaagatgaaaccattgttgaaccgtgctttgatgggagtctaccctccgggctctactttcaaaacagcacaagggctgactttcttgcaagaaggtattgttacagagcaaagtccggcttttccctgttcgcacggattccattacggcaggttgacggtgggttgtcatagtcatggggcaccgattccgctgatacccgccattgctacatcgtgcaactcttatttttgctggggactgttccgtatgttcggtgatcgtaaatatggctcaccgcaaaatgctattaccgtatggaaagatcacatggtttcgcaagggttcggttataaactgggagtcgatttgccgggagaaaaacggggcttgattccgaatgcacagttctatgataaggcttatcgcggacattggaacggattgacggtgatcagtatttccatcggccagggagaaattctgactacccctcttcagatagccaatttgggagcgacgattgccaatagaggatattttgtcacacctcatattgtgaaagaaattcaagataaccggatagacagtctttatcgcactcctcgttataccacgattgaaaaaagacattatgaatcggtggtggaaggtatgcgtgctgccgctacgggaggaacttgtcgtatgttgtcaatgatggttccggaattggaagcttgcggaaaaacaggtacggcacagaatcgcgggcatgaccattcggtgtttatgggctttgcgccaatgaataaaccgaaaatagcaatagccgtctatgtggagaatgggggatggggcgctacatacggagtgccggtcggtgctttgatgatggaacaatatatgaaaggtaaattgtcgccggaaaatgagataagggcggaagaaattagtaacagagtgatattgtatggtaacgaggagcgatagtttatggaaatctttggactgggtaacgatttgtatctacctgctcctgattattggaggatggttcagcgtgtgcggagccagctatgactatggtgatcgtgattttcttgatttctcgactcgtgccggtaagcagttcgtttggattatctgttctttcggactgggattcgtgttgctgatgttggaagaccggatgtacgatatgttcgcgtacattatatatatagggatgattcttttgttgattgtcacaatctttattgctccggatacgaaaggttcccgttcttggctggtgatggggccggtcagtctgcaacctgccgagttcgccaagtttgctacggctttggcgttggctaaatatatgaatgcttattcgttcagtatcaagaaggaaaagtgtgctttagttttgggactgattattcttttgccgatgttattgattatcgggcagagggaaacagggtctgcattggtatatcttgctttctttttggttctttaccgtgaaggaatgccgggagtagtgctttttgcaggtgtctgtgcggtaatctactttgtggtcggtattcgttttgacgaggtctttatagcggatacccctacgccgttgggagagtttattgtattgctgctgattttattgtttgccggcggcatggtgtgggtatatcgtaagaagtgggtagctgcccgcaatattatcggtggaagtctggggatattgctgattgcctatttgatatcggaatattgggtacactttagtctggtttgggtgcagtggggactgtgtgctgttgcgataggttatttgatttatttagcattaagtgagcgtcagcgtgcttactttctaattgctttatttaccatcggctctatcggatttttatattccagcaattatgtattcgatagcgtattggagccccatcaacaagtccgtatcaaagtagtattgggcttggaagaagatttgaccggtgcgggatacaacgtcaaccaatccaagattgccatcggttccggtggattgacagggaaaggtttcctgaatggtacacagaccaaactgaaatatgttcccgaacaggatactgatttcatcttctgtacggtgggagaggaacaaggttttgttggttcggcagccgtcttgatagctttcctggtcttgattttccgcttgattttcttgtcggagcgtcaaccctctaccttcggtcgggtttatggctattcagtcctcagcattttcctgtttcacctatttattaatataggcatggtactggggcttactccggtcatcggtatcccattacctttctttagctacggaggttcttctttatggggctttacgatactgttgttcattttcctacgcattgatgcgggacggagtagaagactctaacaaattgtttatctttcgaataacgtttacggcgaaggtagggtgaagaagcaggcgaatagtcgtcccttcacccgtcaatgcccagcttatgtattttatagtttttgttctttaattataaaaatctttcctttctcggtgagttgccaataacctgctttgttggacccttgacgggttatgtatccataagcttttaaattctgcaatgatcgtttcgctgtagcacttgatgatgacaaggcttcagcaagagtattgtaggttaattttgtattcgtagataatatatgtaatacatttatgtcaactgatgataattttattgggtcatttagggtcattcgttctactatgtgatttctcatttgtcattgtagggtaatttcttttgaacgtaactagcataccgccctctgattgcttaaagacgggttcttctattcctatcgctttaaaagcgttacatattttgctaataccacgttcccacgtttctataaacccggctttgtagaatacggaagctaataaaatgttacgaggatgtgaggagtgcttattttctgcttaccgtgatatccgtatccccacatcatttatcccctgcaatatgtcgtctttcataccggatactaccttaaaagtgtagtttcctggatgtagcgggcgaaccgagcgtatgaaagtctccgactgatagacactgccccagcctttgccgaaccatcttcctgtagagtcagttaggtgaatagcgatggtatcggtgcgccacacagtggaatcctgtagattctgactgataaataaatgaaggtcctgataaggataatccgtacggttacggacttccgcaaatagcctcaaagtcggagggagactgtctgtaataggaacaaaaaaggagagtgtatcactctttccccacccgttgtcgggaagggattgataagagtgatacacggtattcttgttgcatgccgccgttaggcaagcagtgaaaaggcaaaataaactattcctgaacaggcttttcattattggtttgcggtttcggtttctctttattcggctctttgaccggtctttctggcttttccggcctttcttgagcttgtggcctttcttgattcatccctctttccggtcgtctgttttcattattccgtccctgattctgtcctctgttccgattattattatttctcggtcggttctctctttctcctctgttagcgttttcagccgattgaggacggttgtcgttattagctccttttttcttcttcttattattccggttcgcattattgccaccctctttattgcggttacggtcaaagcgggtaacgctttcctgttccagcaaatcaatcggtttcttcagttccggctttctttcttcttcgaacagactgtccggtttcataccttttctattcatcgaaatcacttcaaaagcacgcttcccgctgatggtaactagatttgccgggaaattcttgtctgtggaataagagatctgattgctcaagatatccgctttgaagaaatagaaagtaccatccttcgtttccagttctatctctttggacggaagacgtttttgagcttccacgtagcaatctacttcatagttcaggcaacatttcagcttggcacattgtccggcaagcttttgcggattcagggaaatatcctgataacgtgcggcacttgtagatacggatacaaagctagtcatccacgtcgcacagcaaagctcacgtccgcaagggccgatgcctccgatacgtcccgcttcctgacgggcaccgatctgtttcatctcgatacgtacgcggaatgcttcagccaataccttgatcaattggcggaagtccacgcgctcatcggcaatgtaatagaagatagccttattgccgtctccctggtactctacatctccgattttcatgttcagattgagacttaacgcaatctggcgtgcacggatcatagtgccatgttccttgcttttcgcctcgttgaacttttccatatccaccggtttggctttccgatagatgcgtttgatttccgtgtccgccttgaagttcgctttcttcatttgcaggggaaccagtctgccggtcagcgtcaccacacctatatcatgtcccggagcagcttcaacagccaccacatcgcccttttcaagtttgattttgttactgttgcgataatatcccttccgggtgttcttaaattgtacctcaaccatgtcactctcttccacattgcccggtatatccgccaaccaatcgtaggtgttcagttgtttatcttgtcgggagcatcctttgcagcaaagaccgccgctcccattatgaagtttatatcccatagtgtttatatattaattattgcttcaacagtacaatcatcttcagcgagaagtcgaagaataccattttagcgtttacattctgttcaatatgtatttgcgcttcgcttagctcgtccattattcccattacattacgttcgtttacaaacggagcgaagcgggttgcaaagttctgttcactgatcgtcatatatgtaagatcacgttggcgcaggttaaagatgaagttttcccgaatcatgcgttggcaatattccagaaaattcttttggcgttcgcgtcccatgcctgccacctgttcgctccacattttcatttccctgattttccgttgataggacaaccgcatcaggctgacgaataaatcgaagaacagttgattctcttcgttcagatgaatcgtttcgagtgccttgataaaatttccatttgccagatgggcgatggaaaggctgtcggcagattgaatgctgtacttcgtttgtagcacccgatcgatgcttgcctcgtcaattttccgcacgttcatgcgttgcgtgcggctttggatggtgggcagtatcatgtccggcatttccgataccagcaggaaaatagttctttcgggcggctcttcaagcagtttcaacagtttgttggcacacaccggatgcaatttttccggtagccacacgattgtaatcttgaatcctccctcactggatttcagactgagttttttcagaatttcatcactctcgttagcgaatatctgcgcttgcttattctccgctccaatattgttcaaccaatgattcaagttgaagtaaggggaggtgagcagttgttctctccattgcggaagaaaatcggcacagaccgatactttgggacttttcgccttatttacgatcggaaatacaaaatgcacatccggatgtaccagcttattaaacttcacgcaggacggacatacaccgcaggcatccgtttcactccggttggagcaactgatatagcgtgcgtatgcaatggccaatggtatttttcccaccccttccgggccgcaaatgagctgggcgtgcgggatgcgtccttcattcacctcctgaatgagccgttgcttgacttcttcctgtccgattacgtctctgaaaaacatatcaataaatgattttggctactttcttgatactgtccaccgctccaatggagtagaaatggatgcttggtactccgtgagacatcaattccttgcattgggttacacaccattcgatacccacttgttcggcttccgcatccgttttgcatttcaaagcctctttcacgagttcttccggcaaatccaccttgaatgtcttgggaatcatgctcagttgggacagtttcttgaacggcttgattcccggaatgattggaacattgatacctgccgctttggcttgttctacaaactcaaaatattttttgttatcgtaaaataattgtgttacggcatattctgcgcctgcttccacttttttctttagccaataaaggtcggattcaatattgggagcttcttcatgtttctccgggtagcatgccacaccataagaaaaggggctgttggttactttcatttccgaaccgtccacaaagatacccttattgaaattgttgatttgttcctgcaactcgattgcgtgatgatatccgtcgccttcgggggtgaaaacagattcgtgttttgccttgtcgccacgtagcactaacaaatcagtgatgttcaaaaattgtaggtcgagcagtacatattccgtctcttcgcgtgtgaaaccactgcataggatatgcggaacgactgtgatattatatttattttggatggcggcagccacagcaacagtgcccggacgtcttctcaagcggtttcgttggaatagcccgttgccgagatctttgtaaacgtattcgctgcggtgggtcgtgatattaatatacttcggatcgaattcccgaagtgtatcgactgtctgatatagcttttctattccggttcctttcagtggcggcaggatttcgaaagaaaaagctgtttttttgttgttatgtattaaatcaattactttcattcttttccctaatgttcgttatctacttggattaaacgtgcatattgggacaaaaatacgaaaaaagaaagatttcttcttgatttacgctaaaatagttttgtttttatcgtactaatatccataaaagagggattaccccgtgtaggatacgccctctcttatctaatcattattattttagaatttacttatcaagaaatgatttcttcattctggtgatgtcagtcagataatcttgtaaatcttgttcatgttcctcctcttcggcaagaatatgttttgcgatgtcgcaggtagtgaaatcttttccattggtaaagtcggcaatctcctgataacgaaggattgcacagcgttcggaagcaacgttgtcttttagtaaactaatggaatcaaactcttgtggagcatcatatttgcatctcgccagttcaaaccatttcttaggatcgagcaccgggacaccttctagttcgatgatgcggttggcaagcaattgtgcgtgtttacgctcttcttcagcatgttcttcaaactcgctctgcacatcggcacgcatagctccttctactactaatgcacctacccaatattggtagtatgccaaccattcttcagccaatgctgcgttcaactgtgaaatcaaactttccacatctaatttcccttgtaggatttttacactttctctagccataatttaatgtttaggttaatatatttaagttgactatgtaacagtctgaacttatttttgttttagaggtctgccggttttaacagaaagagtgtttttgtgggaattctaatgctctacgctaaactaaatttttactcaatgcataaaattctcgtttagcgtagagcatttataaccggcaattggttctcgccagttatttttcagaatatccctcgatagatgtccttgtattctcctccctatgagtttgaatagacaaatcatctgccatcctacactagtctcactttatgttgttgaatattagtatattaatagggtgtaggatagtggtgtgggatggttgcagatgcggtgtatcttacccctttccctcgctcatccttacactttcccttacttatccttacgccctgtctttgccatcctgcttttcaccaagtgtttcctgcgtatgaaactttagtttccccctcttgaaactccagtttcctctgcctgaaactttagtttcccctgcttgaacctctagtttcatttgcttgaacttctggtatcctgtggtgaaacaacattttctgttacttgaaacagtctgttcttgtactctctttcggctcttgatacttgcttttcagtcataactgcctgtcttctcaggcattaataggctatgtattgagtattaaaccctgtacataggttgttaatatcctatatgtgagttattaatatcctatatattggttctttatatcctgtatttatgcagttaatatgctgaatatctatagtttatggtttttatccatcatctgccttccggtgataggtgacagatgcggtgataggttgcggacaacctgtcaccataccttaaattccgatgaacagggatgttcatgattgccggtgataggtgatagagggaagtgcgaaaaacttctgtgtatatccgccctgcccgcttccttctttttctccctctcgcgcacacatacgcacgcatgaatataataatgtgccttcccttccagcctttttccccgccccgtccattcttaaaaaaaacgtcccgtcacttcgttatgtttcagcggtttatctttccttttccaaaaaaacttcaaaaaaatagttgaatatatttggattatatccgaaaagcgggtacttttgcacccgctttccaagagaggacagccttgcagaattgacttaatgacaaagcgtaggaccgctttactttaagaacaaaaaagatccggaaaagtttggattataataaataaagttcttatatttgcagtccgatttgcaaagagacgcggttttccgtttatcgttttcgtcccttctttccctttcgctaagagagcctgagaaacgaaccgaaaaagaaaaatgaaaaaacttccgaaaagtttggcagttaaaataaaaccccttacctttgcacccgcttttgaaaacgaagcgcaagttctttgaaatattgataaacaatacaagtagtacaagattaaaatagaaccgtcaatgcttatataataaatataggtatataagatagagtcaataaattgtacggcatcctgaacagagcaagaaaatcatcttaacagatgaaaagatacttttacaatgaagagtttgatcctggctcaggatgaacgctagctacaggcttaacacatgcaagtcgaggggcagcattttagtttgcttgcaaactaaagatggcgaccggcgcacgggtgagtaacacgtatccaacctgccgataactcagggatagcctttcgaaagaaagattaataccggatggcataggattatcgcatgataatcctattaaagaatttcggttatcgatggggatgcgttccattaggcagttggtgaggtaacggctcaccaaaccttcgatggataggggttctgagaggaaggtcccccacattggaactgagacacggtccaaactcctacgggaggcagcagtgaggaatattggtcaatggacgggagtctgaaccagccaagtagcgtgaaggatgactgccctatgggttgtaaacttcttttatacgggaataaagtggtccacgtgtggatttttgtatgtaccgtatgaataaggatcggctaactccgtgccagcagccgcggtaatacggaggatccgagcgttatccggatttattgggtttaaagggagcgtaggtggattgttaagtcagttgtgaaagtttgcggctcaaccgtaaaattgcagttgatactggcagtcttgagtacagtagaggtgggcggaattcgtggtgtagcggtgaaatgcttagatatcacgaagaactccgattgcgaaggcagctcactggactgcaactgacactgatgctcgaaagtgtgggtatcaaacaggattagataccctggtagtccacacagtaaacgatgaatactcgctgtttgcgatatacggtaagcggccaagcgaaagcgttaagtattccacctggggagtacgccggcaacggtgaaactcaaaggaattgacgggggcccgcacaagcggaggaacatgtggtttaattcgatgatacgcgaggaaccttacccgggcttaaattgcatttgaataatctggaaacagtttagccgtaaggcaaatgtgaaggtgctgcatggttgtcgtcagctcgtgccgtgaggtgtcggcttaagtgccataacgagcgcaacccttatcttcagttactaacaggtcatgctgaggactctggagagactgccgtcgtaagatgtgaggaaggtggggatgacgtcaaatcagcacggcccttacgtccggggctacacacgtgttacaatggggggtacagaaggcagctacctggtgacaggatgctaatcccaaaaacctctctcagttcggatcgaagtctgcaacccgacttcgtgaagctggattcgctagtaatcgcgcatcagccatggcgcggtgaatacgttcccgggccttgtacacaccgcccgtcaagccatgaaagccgggggtacctgaagtacgtaaccgcgaggagcgtcctagggtaaaactggtaattggggctaagtcgtaacaaggtagccgtaccggaaggtgcggctggaacacctcctttctggagcgatgccgtaagtgtcacaaccgtgacagtcacttatagactttacaggttctgttttttgtactactggtacttgtttatttatagatatagatcaacctctatagtattatagatagagataaacaagagaaaaaagaagccgagtctagacgaaaggtagacaaggttgaactagtcctatagctcagttggttagagcgctacactgataatgtagaggtcggcagttcaactctgcctgggactaccaagctcaagaaggaggaatagtgagagccaaaagctaaaaactaaaaacaacattcttgaataacctcttgggggattagctcagctggctagagcatctgccttgcacgcagagggtcaacggttcgaatccgttattctccacgatctctgaaaagagaaacgatctttgacatgatgatacaaaaagtaaaattttagtaagagctaaaagtatatatcgaaccgtacgtttccggtatacagactagcaatagttaaatatgcctggaagtcagtttgaaagaaagtaatcaagggcgcatggcggatgccttggctctcggaggcgatgaaggacgtgataagctgcgataagcttcgggtaggtgcaaataacctttgatccgaagatttccgaatgggacaacccgtcattctgaaggaatgacatcttgcatggcaagaggctaacgcagggaactgaaacatcttagtacctgcaggaaaagaaaataataatgattccccaagtagtggcgagcgaacggggattagcccaaaccaatgttgttacggcaatattggggttgtaggaccacgatgtcgcaagaaatttagtgagaagaaccctttggaaaatgggaccatagacggtgatagtccggtattcgaagctaaacgaagcgtagtggtatcctgagtagcgcgggacacgagaaatcttgcgtgaatcagccgggaccatccggtaaggctaaatactcccgagagaccgatagcgaaccagtactgtgaaggaaaggtgaaaagcacttcgaacagaagagtgaaatagtccctgaaaccgtgcgcctacaagcggtcggagcttcgtaagaagtgacggcgtgccttttgcataatgaacctacgagttactttttccggcaaggttaagcatttaaaaatgtgtagccgaagcgaaagcgagtcttaatagggcgactagtcggaaggagtagacgcgaaaccaagtgatctacccttggtcaggttgaaggttaggtaacactaactggaggaccgaaccgataagcgttgaaaagcttccggatgaactgagggtgggggtgaaaggctaatcaaacttggagatagctcgtactccccgaaatgcatttaggtgcagcctcgggaattactactgtgaggtagagcgactgataagatgcgagggcttcaccgcctatcaagtcttgataaactccgaatgcgcagtagttctatcccgggagtgagggcatgggtgctaaggtccatgtcctaaaggagaagaatccggaccatcagctaaggtcccgaaataattgctaagttgaactaacgaagtcagattgctaagacagctaggatgttggcttggaagcagccattcatttaaagagtgcgtaacagctcactagtcgaggagtttggcgtggataataatcgggcattaagcaatttaccgaagctatgggatgtgtaaacatcggtaggggagcattccactctgcgtcgaaggtgaagcgtgagctttgctggagcgtgtggaaaagcaaatgtaggtataagtaacgataaagggggtgagaaaccccctcgccgaaagactaaggtttcctgatcaacgctaatcggatcagggttagtcgggtcctaaggctcagccgaacggtgatgccgatggcagaacaggttaatattcctgtactaccttaaggagtgacgtggagacggagtcgtgacagcgccgcggactgacggaatagtccgttgaagggtgtagatgttgatctttgcaggcaaatccacaaagagagtcgaacctgatagtataccaaattcttcggaataaggtaatagtgcgtgtaagcatactcccaagaaaatccgctaaacttaatctttaaggtacccgtaccgcaaacggacacacgtagtcgggttgaatatactaaggcgcttgagtgattcacggttaaggaactaggcaaattgaccctgtaacttcgggataaagggtcccaacgagagttgggcgcagagaataggtccaggcaactgtttaacaaaaacacagggctgtgctaaattgaaagattacgtatacagcctgacacctgcccggtgctggaaggttaagaggagatgtcatcgcaagagaagcattgaattgaagccccagtaaacggcggccgtaactataacggtcctaaggtagcgaaattccttgtcgggtaagttccgacctgcacgaatggtgtaatgatctggacactgtctcaaccgtgagctcagtgaaattgtagtatcggtgaagatgccgattacccgcgatgggacgaaaagaccccgtgaacctttactatagcttaacattgaatttgggtaattgatgtgtaggataggccggagactttgaagcaggtacgccagtatttgtggagtcgctgttgaaatacggccctttgattatttgagttctaacccgtggtacggggacactgtttggtgggtagtttgactggggtggtcgcctccaaaagtgtaacggaggcttctaaaggtgccctcaggacgattggtaaccgtccgtagagtgtaatggcataagggcgcttgactgggagacatacaagtcgatcaggtaggaaactagagcatagtgatccggtgtttccgcatggaagggacatcgctcaaaggataaaaggtactccggggataacaggctgatccctcccaagagctcatatcgacggaggggtttggcacctcgatgtcggctcgtcacatcctggggctggagaaggtcccaagggttgggctgttcgcccattaaagtggcacgcgagctgggttcagaacgtcgtgagacagttcggtctctatctatcgtgggcgtatgaaatttgcgtggctctgacactagtacgagaggaccgtgttggactgacctctggtttaccagttgtgccgccaggtgcattgctgggtatctaagtcgggattggataagtgctgaaagcatctaagtacgaagccagccacaagattagatttcttagggtcgtcaaagacgatgacgttgataggatgcaggtgtaaaggtggtaacatcacagccgagcattactaattgcccgttcactttctttcggacatgtacggggcgcgatatatacgtttagcttgccagacactgaagttttacttttcatcatgtcataaccttattgaatttcttcaggtggttatagcacgagggttccacctcttcccattccgaacagagaagttaagcctcgtcacgccgatggtactgcgtaacagtgggagagtaggtagccgccgttttttaagaagtcccttgattcagcaacgagtcaaggggcttctgtttttttatcacttctgaattagggccttctctaaggccggataaaagataacctcttctcttcttctgcaaataaaatagctgtatttactaatgctagatgtgaatatgcctgcgggaagttgcccaactgttctttggtttcgaaatcaatatcttcactaaacaatccgaggtgattggaatatttcagaacttcgtcaaacaggcagcgtgcttcttctttatggccggttacaaacaatgcccgtataagccagaatgtacaaatcgtaaaagcagaagtaggcaacccaaaatcgtctttgctgttatagcgatacataagtcctttatggaaaagggctttcttgactgcttctactgttttatgatagcgtatatcatctgcttctataaatccatagggttccatcaatagtaatgaggaatccattgcttgattattatatgtctgtgtgaagctttgaagttccttattccagccatatttcatcacatctttctttattttttcggcttccagttgccaacgttcgctataattatatttgttaagcatttgagcgattttagctccgcgatctaaagctacccaacacatcactttggaagaaacaaagtgttgtccttctccccggatctcccagattcccttatcgggctttctccagttttctactacttttgctaaaatggtctttaccatttcccacatgtcttcaatttcatccaatgtgccgggcatgaggcgataatattggtaaatcaggtccatcaggtaaccaaaagagtcgttttgtttctgatggtatgcatcatttcctattcgtacaggtttggagttcttataaccggatagatggtcgagtatcacttcggttagttggtgctcgccccggatgccatacataatttgataatcatgtttggaaacgaatgtagattggataaatttcataaaacgtttagctgcaccagtgtgtccgatctggaacatggtttcgatggacatagaagcatcccggagccagcaaaaacgataatcccagttgcggacttctcctacagcttccggaagacttgtggttagtgctgctaatacggctccgttgtgataggacattagtttcagaaccaacaaacttcgttcgattacgtcattatatagaatgtatttcttacttctgtctgtccagttcagccaatatactagcgtacggcaatattctattttttccctttctatgtcaattggaattactttctcattataggaaagcaagagaaattcgtctttctcaagaatgatttcttttttctctttgatgtcttgaagagacagggaagcgtataaatattgtctgtccttattttcagaggaacagtaggactctatatactgcggagttatatttaggatcacttgtccctgtgcatagtttggagccggatggtagttgatcttgaaacgcggttttccttttatccaatgtatgtagcgatataattcggcaggcaaataatgtcctgtttcatctttggaacgataacagggcatatagtcgagcactacaaattctccttcatcagaggagaactgggtagaaaggatattggtgtgcggaacataactttgtgtgatgcgatagtctccggcaacttcgaatccaaaagctccccctttctcccggtctagcagactggcaaaaatagaaggagaatcgaaatcaggaaaacagagccattcgatatttccgttctgcgaaatgagggctgctgtacggcagttacctatcactccataatttaaattattcatattgattgcttttattgagtttttaatagatctttgagaaagtcgaaagcgaaagtcaggcgattcttaatacttccttcttttgtggcagttttttgtttgcctagtaaagattgtaagaatggaagtacgtcggattgagcagacagatgatagttggcggcttcggatacgctacctattttaatgctaatagcgtttttgggtaatgcctgaaacatatcttcatctgttgtgtcgtctcccatcgctattacgaaatcgtaatgtctgttggctaatagacgtcccacctccgagcctttattgcaatccggcgatttgatttcgatcactttattcccttgcagaatttgtagtttctgccgggtgcagattgagatcagtgcattgacaagttgttgggctcttaatgtgccgagccatgcgtcactttcacgataatgccatgccagggttgtttcttttacttccagatgtgagtggggagttcggtctacaaacagttgtaggatagaaagaatacccgctccccattctatcttctttatatttttatgccaaactccgttttctttgtagaaagctccatgttcggcagccatagaaataggaagggaaccgagccatttttctaatgtaaaatgatcccgcccgctattgattacaatatgattggcgggatcgctagccaattgttgtagaatagaaataagttctggtgtaggttgggcatcttcgggacgtgatttgagagctgccagcgtaccatcgtaatccagcagaacaaggcgttgttttgcctggttatactttaacttgatttgtgcgatggtagcagctacgatgcgtttttttcgtaacagatcgtttttcatgcacgtcatgttcagttcattgacaaagtcggctgcccatttgttgactgtctgtacagacagaatactttgcatacgttgcaggcgctgcttttgttcctcttccggcatttcaagtgcctggcaaatcgcattctctatttgttccgtatcgttcggattgatttggatagcgtccgtcaattctacagcggcacctgccatttcgctaaggataagtacaccgggattgtcgcatttggtagctacgtattctttggctaccagattcattccgtcccgaagtggagtgacgagggctatgtcggccacatagtacatggcagtcagttcttccagtgaaaagccatgatagaaataacagacgggagtccagttcattgtggagtaacgtccgttgatagagccgatttcttcgtcaatttttgtttttagttccgcataactgcctacatggtcgcgtgaagggacaatgaccattgccaatgtaactttaccgtgatattcagcatgatgttcgaggaaggtggcaaagccacgaagacggtgcaatatgcctttgctgtaatccagtctgtctactgacaggatcagtttatgctcaccgaaaagtttccgggtacgttcaatagcttggtgtacttctttattttccgaagccttatgataagattcatagttgattcccattggtaatgcctctactctggtcacccggttgttgatctgtacttcatccaatttaaaatcgagatgtaatacacgttctacagcactgatgaaatgacgcatatagtcgtgggtgtggaaagcaatgaagtcggctcctaataagcctttcagtatctcggcgcgctccggcagaatacgaaaaagttcgtaggaagggaacgggatatgatggaaatatccgatacagagttccggatatattttcctcaacattcccggaagtagcatcaactgataatcctgtatccatactttgtcgccgggacgtaccagtcggcaaatctcctcacagaaaagacggttgacttgctggtaggattgccaaaaacagttcttatataaggtataagcataaaagtaatggcataaaggccagatagtactgttactgtatccttcgtagtaattttcaatttgcttttccgacaagaagaccggatgaaaattcatttcctgtagtttctcgttaatctcctgttggtccttttcttcattggcacatattccgggccaacctatccagtgcttctcataagaagtctgaagagaatccaaacctgttgccagtccgccttcgctacgcgaaaatgcgaatttaccgtttgtgccgactactttgacaggtaatctgtttgcaataatataaagtttcatatctatctctttgcaaagcatataccaatagacttatattagttgttaatctcttattatcagtgtattataagtattaagtttccttctcttgccttttcaaaatgaaaatccccctttcaaagtgataatttgcttattttttctcttctgaaattctggaaaagtacaaagcttttcaaaatagaatccttttttcaaaatggaagggtatgttggatggatagaaagtttcttgtgatgtgtattttgttgaatattagtctgttatctgctgtgtgtttttgtggcacgcatttggcatgaagggtggcgagtaaaaaaataatagtaatcatttaaaaggtaaaaacatgggaataacactatcatttattttctgcctgttaagcggtttcgcttgtttctggctattttggaaatgtgtagactggtttgaaaatatttaaagaaaaaggagaattgattatgtacacagcattattcgtattaggtattgcgatcttcggttatttgatgtacgtgctcgtcaaacccgaaaagttttaaagtaacacacacagtttaaggtaaaaagtatatgaatacagaaattttaggcgtggttgttcagatagccttgatggtgattctggcttatccactgggaaaatacattgctaaggtctacagaggagaaaagacctggtctgattttatggctcctatcgaaagagtcatttataaagtttgtggaatcgaccccaatgaagaaatgaactggaaacaattcctgaaagcattgttgattttgaatgctttctggtttttctggggaatggtactcttggtttcacaaggatggttgcccttaaatccggacggcaacggaccgcagactccggatcaggcatttaatacctgtattagttttatggtgaactgtaacttgcagcactatagcggtgaaagcggactgacttattttactcaactgttcgtcatcatgctattccagtttattaccgcagcaacaggtatggctgctatggcaggtattatgaagagtattgctgcaaaaacaaccaaaacaattggtaacttctggcaatttctggtaataagctgtacacgtattttattgcctctttctctgattgtaggttttatcttgattctccagggaaccccgatgggatttgacggtaagatgaaggtaactacgatggaaggccaggaacaaatggtttctcaaggtcctacggctgcgattgttcctatcaaacaattgggtacaaatggtggtggttattttggtgtaaactcttctcatccgttggaaaatccgacatatcttactaatatggtagaatgttggtctattctgattatcccgatggcaatggtacttgcgctgggattttatacccgcagaaagaagttggcttatagtatattcggagtaatgcttttcgcttttctggtaggcgtatgtattaatgtcagtcaggaaatgggcggtaatccacgcattgatgaattgggaattgcgcaggataatggtgcgatggaaggtaaagaagttcgtttgggggccggagcaacggcattatggagtattgtaactactgtaacctctaatggttctgtgaatggtatgcatgattccactatgccgctgtccggaatgatggagatgctgaatatgcagattaacacctggtttggcggtgtaggtgtaggatggatgaactactatacatttattatcattacagtgtttatcagcggtttgatggtaggacgtacgccggaattcctcggtaagaaagtggaagcccgcgaaatgaaaatcgctacgattgtagctctgcttcatccgtttgtcattttggtatttacagcactttcaagttatatttatgtgcatcaccctgattttgtggaaagtgaaggtggatggttgaacaacttgggattccacggtttaagtgagcaactttacgagtacacttcttgtgctgccaataacggttccggttttgaaggtttgggagataatacttatttctggaattatacgtgtggtattgttctgattttgagccgttttattcctatcatcgggcaggttgccattgccggattactggcacagaagaaattcattccggaaagtgccggcacattgaagaccgatacattgactttcggagtcatgacatttgtggttatcttcattattgctgcgctgtcattcttcccggtacatgcattgagcacaattgctgaacatttaagtttgtaatactgaattagagaagatatgaaagataataaatcagcttctttgtttccaaaggagcaagttatagaaagtttgaaacagtcattcgtgaaactgaacccacggataatgataaagaacccgattatgtttacagtagaagtggctacagtagtcatgctgctcgtaacgctctactccattgtaaattcttcacaaggttcgtttgcttacaacattgccgtgtttatcattctgtttgtaaccttgttgtttgccaattttgccgaagctattgccgaagcacgtggtaaagcacaggccgacagcttgcgtaagactcgtgaagagacaccggcaaagaaagtggaaggtaataaaatcgttaccgtcagttcttcacagttgaagaaaggagatgtgtttgtttgtgaggcgggagacgtgattccttccgatggagagattattgaagggctggcttctattgatgaaagtgctatcactggcgagtctgctccggtgatccgtgaggcaggtggcgacaagagttccgtaacgggtggtacgaaggtattgtccgatcatataaaggtactggtgactactcaaccgggagaaagtttccttgacaagatgattgcattggtggaaggtgcttcccgtcagaaaaccccgaacgagattgcgttgactattctgttggcaggttttacgcttgttttcgtcatagtgtgtgttaccttgaaaccgtttgccgactatagtaatacggtcatcaccattgcttcgcttatttctttgtttgtgtgtctgattccgacaactatcggtggacttctctctgctatcggtattgccggtatggaccgcgcgcttcgtgccaacgtgattactaaatccggtaaagcagtagagactgccggtgatattgatacgttgttgctggataaaacaggtactatcacaatcggtaaccgtaaagcaactcatttccatacggctccgggtgtcaatttgcacgattttgtggagacttgtctgttgtcttccttgtccgatgaaacgccggagggtaagtctatcgtagaactgggacgcgagtcgggcatccgtatgcgtaacctgaatacaacgggagcgcgtatgattaagtttacggctgaaactaaatgttcgggagtagacttggcagatggaacacagattcgtaaaggtgctttcgatgctatccgtaagatggtggaaggtgaaggaaatgaatttccgaaagaagtggaagagatcatctcttctatctccagcaatggtggtacgccgttggtagtatgtgtaaacaagaaagtgaccggtgtcattgagttgcaggatattatcaaaccgggtattcaggaacgtttcgaacgtctgcgtaagatgggagtgaagacggtcatggtgacaggggataacccgttaactgcaaaatatattgctgaaaaagccggtgtggatgattttatcgctgaagctaaaccggaagataagatggaatatatcaagaaggaacagcaggctggtaaattggttgcaatgatgggagacggaacgaacgatgctcctgctctggcacaagccaatgtgggtgtagccatgaatagcggtacacaggcagcaaaggaagccggtaatatggttgacttggataacgatccgacgaaattgatcgagattgtggaaatcggtaaacaattgttgatgacacgtggtacgctgactactttctctattgccaatgacgtggccaaatatttcgcaattgttcctgccttgtttatgattgctattcctgaactggctgctctgaatatcatgcatctgcatagtcctgaaagcgccattctttcggcagtcatttttaatgcgattattattccgattctgattccgctggctttgcgtggtgtgcaatacaaaccgataggtgcaagtgctttgcttcgccgtaatctgctgatctatggtgtgggtggtgtgattgctcctttcgtgggaatcaaattgatagatttagtagtaggtttattcttttaattaaaaaacaatagcaatgaaaactttattgaagtctttaaaaataacacttgctttttgtgtctttttctccgtgttctatatccttatcctgtgggtgttcgcacaggtagcaggtcctaataaaggaaatgccgaggtggctacgctggatgggaaagtagtgggagcagccaatgtgggtcagatgtttacaaaagatatttatttctggggacgtccttcttctgccggtgacgggtatgatgcgacgagttccgcaggtagtaataaagggcctacgaatcaagaatatctggatgaagtgaaagcgcgtattgatactttccttgtacatcatccttatttgaatcgtgcggatgtgcctgccgaaatggttacggccagtggttcgggactggatcctaatatcactcctcaatgtgcgtatgtacaagtgaagagagtagcacaagcacgtggattaacagaaaaacaagtaagagcgattgttgataaaagcatagaaaaaccgtttttggggttgttgggaacagaaaaggtgaatgtcttgaaattgaatatcgctttagaggaaagcaataagtagatgaagattgagcagcgttcctgtccggaccgtttgggttatgccgcggttcaaattaacagggttggatggggcgctgcttttttacaggaacataaaatagaattagataaaaagtatgaaaagtttttttagtaaaaagagtattttaggaacaatggctgtagcagccgtatgtatgttgggaactagcaatgcacaagcacaagagtttactatacaaggtgatttggtaagttcgtatgtatggcgtggtatttatcaggggggagccgcttcctttcagccgactttgggatttagcgtaggtaatttctcgcttactgcatggggctcaaccagtttgagtgagagtaataaagaaattgacctaaccgcagcttataagtttggtgaagcgggaccgacactttctgtagccactctttggtgggacggacaagctgatgtggctaatggagaacttaccaataattatttccattttaaaagtggagacaccggacatcattttgaagcagggttagcttatacgcttcctattgaaaagttcccgttatctatcgcatggtataccatgtttgccggtgctgacagaaaaacgactgatgagggggaggaaaagcaggcatactcttcttacgtagaactgaattatccgttcagtgtgaaaggagttgatctgaatgctacttgtggagtggttccttataagactccgcagtataatgtgaatgggtttgcagtgacgaacctagctttgaaagcaacgaaagcaataaattttaatgataagttttcattgcctatatttgtacaggctatatggaatccacgtttggaggacgcccatttagtatttggcgtaactttaaggccataaaataaactcatgaatttttgtgaaacccgtggtgatcgtgatgattactacgggttaggatgtttaaaataacagattgacgtaatggatgatagagaacatagtgtacagtattttttggatctgataaagaagtcccaccggggcaaattcaaggtctatatcggtatgatagccggtgtgggaaagtcatatcgtatgcttcaggaggcgcatgaactgctggagaacggtgtgaacgtgcaaatcggctatatcgaaactcatggacgcgccgggacggaagcattgctgcaagggctccctgtcattccgcgtcgcaaaatcttctataaggggaaagaattggaagaaatggatctggatacgattatccgtgtccatccggaaattgtaattgtggatgaactggctcatacgaatgtagaaggtagcttgaacgagaaacgttggcaggatgtgataactttgctggatgagggaatcaatgtgatttcggcaatcaatattcagcacattgaaagcgtgaatgaagaagtgcaggagattacgggtattgaagtgaaagaacgggtgcccgacagtgttcttcaggaagcggatgaggtggtgaatattgacttgacggcagaggagctgattgcacgtttgaaagcgggtaagatctatcgtccggaaaagattcagacggcattggataatttctttcggacagagaatattcttcagttacgtgagttggctttgaaggaagtagcgttgcgggtagaaaaaaaggtggagaatgaggtggtgatgggagtagccgtcggactccggcatgagaagtttatggcttgtatcagtagtcatgagaaaacaccccggcggattatcagaaaggcggcaaagttggcaacccggtataatactacttttatagccctgtatgttcagactccgaaagagagtatggatagaattgatctagccagtcaacggtatctgttgaaccattttaagctcgtggcggaacttgggggagaggtggtgcaggtgcagtcgaaggatattttggggagcatcgtcaaggtttgtaaagagaaacagatatcgactgtttgcatgggaactcctaatttaaggttgccatacgctatttgttctatactgggatatagaaagtttttaaataatttgtcacaagctaatgtagatttgattatacttgcataatattaatcgtatgaacgttatgaatattaaaacgaaactgattctcggtatcggaatgctggccggaatgattattttgctggtaacactttcagttgtgaatcttcaaattctgacagcgacagaacctgatagtcctgctgctatgcccggattggaacgtgctttgttatggatttccgtaacgggaggaatctgtatcttgaccggactggcgttattgtactggcttccccgctcaatcagcaaaccgataaaagaactgaaagaaggtattcttgaaatagccaatcataactatgagaagcgtctggatatgagtggaaacgaggaattcagggaagtggcggatagttttaaccggatggcagaacggttgacggaatatcgtgcaagtactttgtcggatattctttctgcgaaaaagttcatagaagcgattgtgaatagtatagatgatccggtgatcggcttgaatatggaacgcgaaattctgtttatcaatgaggaagcgctgaatgttctgaacctgaaacgtgaatccgtgattcgtaaatcggcagaagagcttgctttgaaaaacgatcttctccgccggttggttcgcgaattggtgacaccgagtgagcagaaggaacctctgaagatttatgctgataataaagagagctattttaaagcgtcttatgtttcaatcatcaatacagaagccgggaaaggagaacctcataaactgggggatgtgatattgctgaaaaatatcacggaatttaaagaattggattctgccaagactacatttatctcgacaatttctcatgaactgaagactccgattgcggctattatgatgagcttgcaactgctggaagataagcgggtaggtgagttgaacgatgaacaggagcaactgtcgaagagcatcaaggagaatagtgagcgtttgttgagtattacgggagagttgcttaacatgacacaagtggaagccggaaaacttcagatgatgccgaaaataacgaaaccgattgaattgatagaatatgcaattaaggcaaatcaggtgcaggcggataagttcaacattcagatagaagtggaatatccggaagagaaaatcggcaaactatttgtagatagcgagaagatcgcttgggtactgactaatttattgagcaatgcaatccgttattcgaaagaaaacggtcatgttgtgatcggagccaggcaagaggatgatatgatcgaactgtatgttcaggattttggtaaaggtatcgacccgcgttatcataaaagtattttcgaccgctacttccgtgttcccggaacgaaagtgcagggtagcggactcggattgtctatttcccgtgattttgtggaagcgcacggcggtacgctgaccgtagagagtgaattgggaaaaggtagtcggtttgtgataaggctgaaagcataaaaataaatgtctttttggcgaatcaatatattgtagcgtcttttaaaatatttatatttgcaggtgaattgaaactaaggtcaaactattggctatataaaaacttaaaagaaccagaatcagatgaaacaggacatgattgttatccttgacttgggtagtcacgagaatacggtattggctcgcgccatccgtgcattaggagtttatagtgagatttatcctcacgacatcaccgtagaagaactgaaagcattgcccaacgtaaagggtattattatcaatggcggaccgaataatgtgattgatggcgttgccattgacgtaaatccggctatttatacaatgggacttcctgttatggctgccggtcatgataaagcgatttgcactgtgaaattgccggaatttacagatgatatcgaggctattaaggaggctgtaaagtctttcgtatttgatacctgcaaagcggaagctaactggaatatgacaaactttgtgaacgaccagatagaactgattaagcgtcaggttggcgataaaaaggtattgttggctttgtcaggtggtgtcgacagctctgtggttgctgctttgcttctgaaagcaattggtgataacttggtgtgcgtgcatgtcaatcatggtttgatgcgtaaaggggaatctgaggatgtggttgaagttttcagcaatcagttaaaggcaaatcttatttatgtggatgctacagaacgtttcctgaataaattagcaggagtggcggaccctgaacaaaaacgtaaaatcatcggtggtgaatttattcgtgtgttcgaggaagaagcacgtaagttggacggtatcgatttcttggggcagggtactatttacccggatattgtggaaagtggaacgaagactgccaaaatggtgaagtcgcaccataatgtaggtggtttgccggaggacctcaagtttgaattggtggaaccgttgcgtcaattgttcaaggatgaagttcgtgcttgtggactggagttgggcttaccgtacgaaatggtttatcgccagcctttcccgggaccaggtttgggagtgcgttgtttgggagctattacacgtgaccgtctggaggctgtgcgtgaatctgacgctattctgcgtgaagaattccgaattgcaggattggacaagaaagtatggcaatactttacagtagttcctgatttcaaatccgtgggtgtgcgtgataatgctcgctcttttgattggccggtaattattcgtgcagtcaatacggtagatgctatgacagctaccatcgaaccgatagattggcctattctgatgaaaattacagaccgaattctgaaagaagtgaagaatgtaaatcgtgtctgctatgatatgtcaccgaaacccaattcaaccatagaatgggaataagaaaatagagactaaaattcaatcagccccgaatgtcggtatatccagctttcggggctcagttgtaattttggggggattaagttttgtcaattcccttcatgcatatacctctgctagcctaaaaaggaagaagctcatatccactactcctttaaatgatgccctaaatgctttgattttagcattaaatgcttccgctactgcatttgtactcctgttcacaaagaagttcaaaatcctttcataatggttctcaatagagtttgctactgttgtgaatgtatcgtatccatattcttcaatcttattataccatagtgctagctttgctcttgctacatccttgtcatagtttgtggaaaagatctttcccaactccaatgagtagtaattacgtgcttaatatcttcaaactgcttgaaaagtaattctgccctgattttctggctcttggtccatttatcaggtgatttaaataataaatatctgcttctggctaataattgcctgagtgtatctccgttttcgagttcttctgttttatgtacttccccttctcttttgccgctttcatggctttattctcctcttttcaacaagaaaaatatatgattgaagacaattaccgtccccatctcataaaaatcaaaaatagaaaagaggactctggggtatattcttcgattggataaagagttatacaggatatgcaaggaagtgggctatgatgataggactcatttaacaacttgtaaattctatatttattaacacaataagttaaaacggacaatatttataaaggcaggattgatatgtataatgaggaattctggcaaacaataaaagaaggaggggattatacacctccttcacagtttatctcatccattctgtgatcttgttcttggcatagaaataatagaaagcaagtccaagccaactcgtaatgatgattaaaacgatgaacaaaagtttttctcatcatagcaccattcgttttcttttatggtaagaacaaggccgatgatccatataataaatccaatcatagctttatattcgtttatttgttatatcaccacaaaagcataacattttttaatttcaatagtatgtacggactattaatatgtttttatgaaaatgttgtttcttttgacagaatcaagccttcattattaacagacggtgtatgttaacgtgagttcgaaataaaattagaaaatagacagttgtccgtcattgacaaaatttacgtcaatggcgggcttcttttcaaaaaagcagtatgccgcgatagccgacaaggagttggctataaagttattgaatgaacgatgtctggagtgttctatctgcgcaatgttcttcaattcgtcattgactgtttcgatcagggctctttttctgagcaaaatcttgtcggcaatactcatcagtgagttactcatattatttttaactttagtgacaagctgtatgccattcaggaaaagattttcaaacagagcctgacctatatatcccttgtctgcacatagttttcctttgatgttttccagaaacttaccttgcttcaacggttcccggtcatccacgtttccaggcgtgaacatgaaattgaggatctctcctttatcattgattatcagatgcagcttgaatccgaagaaccatcccattgaacatcttccacgctcggcaagcccttcaaatgtcttatgaataaggattctttggttacgacatatacgtaaggaagtggagccaacgaaactgatgccgatacaggttcccagcaggacttttttgatgaagatagtcatgggaagcaatacttccttctccagttccacaaaacggttataagaaacctgacgcggaaaaaggtgtttcagatgtttacagacatattccttatagtaatgcttgaaactgcggaaaccaccggagtgaaacaggatgagaataaccataatctctgcatcacttatatggttggggttgttacgatgattggtcttcttatccttaatcatatatttttcctgttgaaatgtaaattccttgcaaaaatcatcggccatacaataaatctctgtaactttagactctggaaacatagcggtaatcgtttaaatgttataattcagcactataaatttaatacttttatcgctatgtttctaattataagtgaaatatatttattcttatatcgaactcacgttaaataataactccaatacacaaacacaaaatttgccctgctatttttcccgtagcagggctttctaataaaatatatgattgactgaaaattacttcaattttatatctgaatagcagaaagaactaggcttccgatattaactgttatatcaccgctaatactttaaaatctggtaagacaagtagaataaccttttttcttttcttttttatattctctatataggaaatagaaaatttttggttgtaagagttgtagatttactgtaagtagttgattatattctaattcatttattgtgaagtaaagatataatatctaccaattttcatatttacctccaaatatcattatttcaatatcttctttcattataatctatctattgtcttattaacctttcacttaaataatctaagaactgaatatcttagttttgacttactactgtctttttgaaaatggaaatattactttgcatcaataatacgatcaattctttcttgttctttctttacaaactcatataattcgggtgcgagagccagtttgtgagtttggatttggctggatattactgattcaaaaatgttcattagttctctggctatatctattatattatttttttcttgcaaatatcagatattatcggtgtgtattcgggattgagtttcttacatgttgttgccatttgttttacaatgtttgtaatacacaccgtttgttcttctattgagagcttatctcgggattctaaatgcagatgtagtaagttgatacattttacccattgtccatataaatctctaattatattcagacgagtgagcaagatattggcagtaggatagtttttcaattttattagctggatattcagccggatattattcaattgatcttgttctgcatatggtcgatcttatgtctgtcttctgtcgtaaatgtcttgtctatccattttgaagagaaatcaagaacatcaattggttttatagaatggattatctctagaatattatttaccatttcatcaagccttttttgctcttgttctttacgaatcagcaaaatttgaagtttacgattttctctattctgtttattggatgcatttatggacctgaaagcaattatcaaagcgattgtagttgctaccgatcctatagcagtccagtctattgtatataaatcaatattcattttgtttattacatcacgtagttttttctacttccttatcattctctgtatcattatcacgatccatacaaatacaacaaagggagcggttaaagtcgttatccctaatttcattccgataatctgtaatatggtagacaatgtaatagctcccgttgcccatatacaacttttctaatctgttcctcccaagactatggcacataatacaccattatagtaatagatagataaatacattgtgtacgttcattaattcatcaataaccggggcggatttgaccaaagattgcagtatattagtcgataaataaaatatctgcaagaattatattataacaatacaacttcttacagatatttgtaaaatcctatttttaatatatctataatttttttatagatataatttaatagatgactttatttcagagaacgagttcctgtcaaaatatcatcggggactttgtcacaacgtacatatactgaaatatcttccggattatctttaacaatccatttcattgaattgtccaacatctcagtcactatatatttattagcccaatcacctttaccaaaatcatatgtaccactcagaataaagccatcttctttttcttctatcaaaaatgaaccagtcagttttcgtgaatacatactattgaggttttgatacattatataagtatgttcttttcggtcgaaggtgatatagcaataaagttcgtcattcatttcctttccattccattcactcaaacgccatgtaccgttgagattcttatagtttacttccaatattgcgtcttttacatcatcgtcatcattacaggctacaaatgtggcgagtaacatggtacataacagcattttaaaaaatacgttcattacttttcttttttacttgtttctttactaatttctattctcaaaatccattctctatagacacggtaactgtgcgttctgagggcgtggagctgattccttctagaatgaccggaaactttagaggatattttaggccttgaggtatcaggtgtttgtttaccttgatgaaaatattcgcttccattccggccggtatgacttcaggctctactgttacggttacataatcagggagcaggattttcatggctgttaccgtcagcggattgttcccactatttatacaggtgagacgttcggcggcaatgccttcaggacctgcttctgtaaaatggaccacttttcttctaagtctcaaatcccccattttatagggaaaatttctccattgctttttggaaggagtgactatgcctgtcagcacaagttctgctaccggagttgaagaagactggtcggtatacacaaaagcacgggtatataactttcctggatgtccgtccggatgataggtgagtacaatctcacctttttcacccggattcaactctttttgtgtaaattgggcagctgtacatccgcaggttgtagtcaccttggtgagtttgatgctccgtttacttgaattgtgaaaaacaaaacgataagcggatgcttcatcatcctcggacaatgtaccgacgttgatctcttgtccggtaacaaactgcaagattttttcctgtgcattggcacaatgcgtagcaacccatatcagcagaaaagtgattaatgaatattttttcatatccgtccttttgcgatagagtcaatttataaccagccattgccaccggcattggtacgcacagtgatatagaactcttgagtggtagcgcttcctccatttagcttggcggtagctacagccttagtcaaaccagatttcaatccttttactgtatatttgccgggagctatttcagtcactgtcgcaaccgtttcgtcagctacctgacaagtgaagtctgcatttccgggtttaaaataagtagccaagttaatggttgtcgtcttgcctgttcccagataaatgttgggcactttcatgtctacaccagaaccttcgatgttattcaacaatagagctgcatcgatcatgccgcctacttgaccgacataatcacttaactgaagacgggtaggatgattagttccgttaaccgaccagttttcgtaatatagtttgctttcatcggaataagtaatcggttgtgtggatttcaataataatttccggaagtcttcggcgcggaagtgcttgccgagtttcactgcataagacaaccccaaagcagctacgcctgacacatgaggacatgccatcgaagtcccttcgtagtatccatagttatcaccgaaatcggttgaggtagatccattctcatcgggtgtagcagttcctcttcccgggagggtagagagtatagaaccatattcagtgcaatgataccaactgtcaccgccgggagccgaaatgtcaactcctgtgctgtaattggagtaacaagccggagtttcatcggcagctgttgcggcgactgagatatagtctttgtatgctcccggataagaagacatcggagcaaattcatttcctgctgcgaagactacgattccgccttcaatcactccgttcggagaaccggcattgttaacaaaataatccaatgcctccttttccaatggggtagtggatgcccattcttcatctgttgtaggtcccggagtataattcatggcgttggaacgcccggagttatatccccaactgcattgcaaaataacagcaccgttatctgccgcatatttgatagcttgggcttcggcaaaaagagttacccctttatctccggaaaataattggcaggacataatcttcacacccgaattatctgttccgtcaccacctgctataccggatacgcctattccgttattattgacagcagcaattgttccggcaacgtgtgtaccatgtccggtatccgtagcttccgaccaagatatatatccatttccggatacgaaattatagccgtgtacgtctcctgcatatccgttcccatcattatctacaggagaagtaacatcattttctcccggatttttccacatgttttgagccaggtctttatgagtgtacattactccttcgtccaaaacggcaacaataatagatggatcaccggtgcattttttccacgcttctttacagttcacgtctgcaccgaccgttacagtcccttctttggcttcttttattgttccgttattgatgtagctccattgcaaagccagtcccggatcattaaatggcctttctgccgattcacttgtacacatggcaatggcacgtttggtttgctcgtcgagcataaaaggacgcttttgagtgttgtaagcccgttttatagtacggttgtattcgatagctgcaatttctccaacattggataggtcttgagctattttctgcaaatccgcatccttatcaaaacgtaccagataccaaaggtgaagccctcttttacgagtacgttcttcatggcgtacatctaccgggaaaatacgttcaaaatgataagcgcctgcaacatccagcacttcatctacagtgggaatactggaacgagtcatcacaccccgttctgaacgtgtctgtgcctgatccaataaatcagcaacttccggtttgaacttgattaacaattctccccggcatgcatctgccggaatggaagttaccggagtagtcagttcattcgttgttaccatttccgtgtctgtgcaggacacgaaaaaagcagtgaacaaaatcgctattttatagtatatctttttcataattcttcaactgtttaattttcccaagtcgggcgtttgttaggatacaactcgtaatattcttcaaaatccttcggtatattgacaaagcccggaaggttgccttttgtatcactctttgcatcttcttgagtaaagatgaaagtgaatgagttccagtcagccatttgaggatgaagcagaatccaattgggaatttcaccatgcaaatagttcaggttgacagtaaatcctttggtcttgaacattacttttggtgtgcttaccagaatctcaggtaattcatctttcttatctcctgtattttgggatgctttaatatcttcctctgtatagaggtcaaacaatccggagtcagagagatctttatcagttggcaattcaccttcgatatagttattggaaagttgtaaagtatccaattcccatgccagcatttccatgaagcgccgtttatctgcatagctgctcaaatccaaatataagccatccttatctttatccagcgtagtcagatcggaaacaacgtctcttcttctgttagcattcattttcaacacttttaagttcggaagtatctctttattgagcacagccggtatcttgttgaaattattgctggacaaacttaaaacttccaatttgtctcccagcttttttaattcgttgatatcaggcaattccgtcaagccataagcatctaacctcaaatttttcagatactccaactgacagacctcatttcctaatttgatactcttcaatccattattcgcattactgaagaattccaatgtttctacatatttcagatgggtgacttcagcaggaaccgattcttctgtttggaacatgctaaagagaacggaacgcacacgacctttcatttgaggattatcttttacctcctgatcggtattttcccaaagttttacaccgttccaatatctcatattgcggctaccatcccaaggcgacatcacattcagacgttcgctgataatcagcagtgccaatgagtctcctgcacggttgtccgtaatggtaggagctgctttttgcattaccgtcacaaccgtttcctgaggatttccgtcattgtctgtaaatttgaaagcaattttagccgcacgcttctggtcttctacattgacattccagtcaaagcgcagtttggcggcaaccgggcgctgaccatagtcaagattcaaatctttctctttgtaagtcgtagagagccatttggccttttcgcccatttcaccggtgtcgtttccggattcatccaaaatagcttcctttatttctacgctaaatctcacgttggttacaacagacagttcaaagaaacgcttgtcttttagtgccgaattttcaatcagcgtatcagtggtggaaggatacactcccaattgatatcccatctgggtcagtttgatggtcttaggcatctctccggcagcttctatacggatggatgctgttctcggttctgccaataccgatgcatctgctgaaacggtgaactctccgcttcccataccatttgccggtgtaatcttcaaccaggatgcgtttgcatttatattccaggtattggcagcagtaattgtcacactctctgttccgccattttccggaaaaaccagttcctccgtgctcagcccgaaagcaattgcttgatcatcgtcatcatcgtctgtgcaagccgtaatgaaagctgcagacaacatcaagcctaaagtcagttttactatatatttcttcataaaattctattttactgcaatacaacttatttattctccaactttaatgcaggacatccgcggatattctgccaagagtcgtaaatcaatgtatacattccggcagtgatataaggacaaacggctgatacgttaattacgatttccggattgtcgctgatatcgagtatgtaaatgcggtaagagatttcctcagtttcgggcacttcaccgatatcattaccacctaagaagagacgttgcagtaccgggcaggtagctacattggtaggccattctttcatgcaacgataaccgtccgcgtcacgttgatgacggactgcgatagaacgcaatgtctgaatatacagtgcctcgaacgggaacttgttgaatcggttgtaacttaaatccatctgtactatatagtagaagttggtagagaaatcttccggtagttcagtcaggcagttgaaagtcaaatcgagtgtattcagcatattggctctcggaccttttgaagctcctttaggaaattcggaaatctgatttcctgccagagtcaacgaacttaccggagaacccgcctgaatgatggcccccggaaacttagtcagcttgttgtatgataagtctatcgtcgaggcattgatccctttatagccgttgccatcattttcgatgcttgctatttcgttgtatgagaaattgacagaactcatgacataaatggagctggcatcgaacatatcgggcaatactttcagcttgttgtgagagaatgaatatgtttcgatgttgttgataccgctgaaattatccggaatttcttcaatctcattgtagtccatattcaattgcgtcaaatcgatatcggcacccatcggataaaggtttttgattttgttgtgtacgcaatccaacttagacaactttttcatttccgcaaattctttcggaatttcggtcaggttgttatagcccaagtataagatttgtatactttttccggcatctgatgttgccagactcttcaatccatccagtagctcctcacttgaaaactgaggattcatggccagattcaatgcctccagattcttcagtgtatttaattctttgggaaattttgtcattttctggcagttgtagatttccacatcacggcactcttccaagtattttatggaagaaggtaatgagctaatctcaccattggctatatagaactggcgcagtttggtcagattcttaaaaatattatctccatcctcaaatccggtgataccattggtatagtcacccggctgcacatctgccggcatgatatccgcctctttagtcttgtttttcttcaagtcctcaactttgaaatccggttgcaatgttgcagagaagttaatgtacggactttttttcaaaaacttattgtaatagtcgttacgtgtctcttcaagataagtagtagcggcttctgccccgtatttcatttgcgggctgatagagccgatcttatcattgtgagagccgagtgtcaaaaccgtaagttcggtaagcaagccgagttctttggggacaactcctttaggattgaagtcaccgatattcagggctgttacacgcccttcgctgttcactgcaactcccggctgatttccccacatatctacttccttgttgaagtcccagttggtgccacgtggatatccctcgccgttgaacgaccagttttctcctcctaaagctttccaaatcgcttttaaagcataataatcctggatgtctgcagccagaagattggttttcaccggaacttctgcatgggtctcttcaccctccttgataataaaactgttttctttcagtgatgcagtcgattccaaaggtattttacttgtcttattgtaagtagtatacgaaatgacttcatattcaccggcctctaaagtaaccaatgtgtcaataacgccgactgccattcccggacttccggcttctgtgccatcaaacccttctttatacttcactttcaagttggtgaaagtactgtcctgctgagtataacggtttcttactttgatatccactttagctatctcagagaaaagatacgtctttccacctccgtttcctccggcacgtgtattttcagaagtgccttcataaaagtctttcactaatttgaactttaccaaaccactgttgacagctttcacataaatgtcctgtacgatcaatccacctgtctgtatggtgaaaacggtaggctctgccggttctccagagaatattttctcttccactttgttgaacaggtaataaccgaccaatgtgtactctcccggaagcagtttcagtttatcgctgcgcaaaccgtattctgccgattggtcattatatgcattcagaggaacactttgagtaatcgttgtgttattgtgcaaaagtacaacctgcattttcttggcatcattcaagaaatccaatctgtcagtagttgtacgggtggcagatttctccccaccttcaatactcttatagagtttaaactgcacataaccgttgcctgtctgcatctcctcgttgtcatcggagcatccggtcattaccactgtgcagagcagggcaataactgtggctatattcagttttgaaaagaatgattttaatttcataatttgaaaatatcttttttaactaagcattaatactgttcaatcaaaagtacgcttacgatttctccatgttccatattcatatcatcttgtgcatactctttgatggtcacaaccataggtggtgtttgtacttcgggatatgccggaactgtcaatccccacatattgccatcccatggtttaatacttacacctgtccatggatttgcacactctggcataataatatcacatccggctaccgttacttggaggttttcataagcttgtgtatgatccaaagcaaccgcccaaacattcgatgtaccatacttatctggatcgacttctactttcacaggatcttcaccttcaggcaaaccttcaataataaatccacccttttctatcgcctctttaccttcttgagtaaagtctactaaaatatatggagtgtattgcgcttttaattcaaagaaaccgtctaaatcatcgaaaagattattcatatctccccctaattcttcatattttttagatggaagcactaacaccattcctttacgagggtctccgctattaccggtcatcatatcctcttcattagatttgacagatatagaaatattgcggacgtcttgttcgtctttttctggaaagatccaagtagaccattcgtccaacggtgtatacccccatttttcatcaaacgaaaggcataccgttttatattcatcatcgcgggtaataacctgtaatttcattggggcctcttttttctccacttcttcaccggataaactggcagtccaatattggttgccatcctgtgaaaaagtccacccatacgtattcattgggaactgcacagcatcttccggcattccttcatacgcaaccggaatctcgatagaatattcttgtccgtccttatttacgaatacaattttgttatttatatctcctgcttctaatggatatctcacatctgcattctctgcaaaatcaagagcaataacagatgtcttgccggctcttcctactctgtatttgccatcgatggagatccattccggatatttttgtatttcccaatcaaaattcgcaactacgctgatgttctccaaactgattcctatatctaaatatttcaatgtagccggatttccctctccgaaaggatgttcgatgtcctgatacatctttaaatcgcgtgtattggcagaacggttcactacagcaatcgcttgcgtctgccctcccattgataatgtgatttcagccaaagaattttcaaaatcccacacatcgtctgtagctattatttgcaccttctgttcacccgccttaccggccaatgaattctgcaattcaccgtctacagagaatttgcaccataatttggaagaagcgagtgtccaaggctggttggcggtaaataccaactcggccgactcattctctcccggctggcaattaagtactaccgattccgggaataccggaacttccagtttgtcgtcgtcatccgaacaagcagtaaaggtagtcatagccagcagcattgaaaatgctcccaagagccattttatatttttcatactcatttgaatttccgtttatttagttattctcatctgatggttcttccggtttaactccggcttcagcatcactgatccattcaagaatagtcagataggtgttttctgtctgtacttcgtctcccttttgtgcatacagcataaaatataacatacaataatgctgacatacattataataagaaagcatattgacaggttgctgtattcttagattaccatctccaattggtcctccgaaaacttcattcgtactggctatcacctgaccttgctccaagtcgattagcggttggagcggatcttcggtactaaagcgtattttaatgtcatatcctttatagaagaaatctttgagtatgactgcattttcttcttccggatcgggttcggtcataatgatacgttctgttacacccggcatgtggctatcaaaatatgtagaagtaacacgacagtagcgagtgaaggtattcagattgaatggacatactttgcgcaagacaacgcgtgccttatcaccatatacgctccatatctgttctttattgaccaggcgcagcgtgacaccgatagaatccgtgtctgcaattttgtcgaaattaccacggatacgcaccgctgtagagtactcaccggctttaatcgtcactgagttggactcgattgaataatgtttcccttcgatggcgttgctctccttgtctattacttctactccgtaggtgcggtcgtaaccgcatgcttgggtagctgatatatatacatcatggtagtcattattctgaatggcaatagtcgataatgtatcggagaacatgacataattcggaccgtcgtatgtgacatgatcttcgtcacatcctgccaggctgcatcctatgatgacagtcgtgcataatcctgctagatagtgtttcattgtcatatattctgtttagttacttatttattgctctcattcggttcaacttgcgaccccggtaaatccagttcgtgttgtggaataggccatacaaacaaaggattggaagcatctaccttcagactgcttcctactgcaatcgtattcgcttgtggcttacgggtgaatccgtcaacaagtccttgttgcccccaacgtttcaggtcattcaaacggaagccttccatataaagttccctcacacgttcttctgatatttccttgaaccagttttcttccgttaaagaagcggaaccgtagtttgaataacgtgcctgacgtaatgtggtaagatcatttgctcctttcccatattcaggattcgacttctggcaataagcttctgcgcgaatcagatactgttcagagagacggaatactttcggcatggtaacatgcaggatgttctgttcatagaattcctggtttccgaaatatttagccagcaaaggccattgtagaccgtgttcgtatccggttctataagattggaagaaagtagtagcacgcaaatcagtatctgcatacagattcaacacccattctgccggaacataatccggtttgaacgaattgaaatcataattgaagaatatctgtcctaaacttccaccatatgatgtggtggtgaatcctactttccagatggtttccgtggaatggtcgtactgccacatatactgataataggaagtttcggaatcaatcatttcggttgtactggacaacttgaatttacggctgtcgattactttcgaagcatactcaattgccttgtcccattcttgcatattcagatagacacgtgcgtaaagagcgtttactgcatatatagtgaagtagggagtatcataataagattcgtcattctcgttttcatccggtttgaggcaagttgcagattgagctagatcgtctagtacgaattgataagagtccttcaaggaagcacgtttcaatgtgccagcgtttgaatagcttgataccaatactactcccagttcatcagcggcagtggcaggatcgtatgctttgcaatacatcttgataagatccgaatatgagagggcacgggcaaagagagcctctcccttgaactgttgtaatttctcataatcttcatcgtcaacctcctgctccaatacggcaattctttccagcaggaaattgcatttaccgatcagagcatttagtgttccgtaaacggcctccacttctgtattggtaggcaggatatcccagcgccaaatgttgccgtatgtattggtgtatccttctacggcataagccagatcggcttgtaagtcgggtaataatgtcagtaagccgctataaagattaggattcttcatgtaggcataaattccaatcacagcctgattggcttcttctacagttctgattgcatctccttccggaatcgcatcttcaggatatttgtctagacaagacaccgaagagaaagcgacagcagccaaggtgatatatatctttatcttttttatcatgattactatgtttttagaatgtaatgtctaatccgaaactgaactgacgtgacatcggataggcagcctgatacatgtttgagttcgtttccggatccaatcctgtaaacttggtgaatgtcaacagattctgagcttgtccgtaaagacgcgcagagctgatgaatttggtcttcttcagccaattctgcggcagggtataggacaacatcaggtttttcagacgaaggaatgatgcgtcttccaagaaacgggtatcatgctgtgcataaacgccgtgacgaggaatatccgttatgtctccaggctttttccaacggtcgtaaagcagtcttttcgattggttgtacatagagaattgtccgttgctttcttccatatagcggtcgttgttgtaaagccaacgatcggccatccaactgaactgtgtatttagtgaccagcctttccaagtcagtgtagtgccgaaaccaccctgccacggagcgatatagcttttaccggtcatcactttgtctgcttctctgagttcagtagtcacttcaccgtctttggtgtaccacaacgcatcaccattagccggattgacaccagcatagcggttcatgtaaaactcactgacagaatgccctacggtcagtttgcttgcggtggtacctacaatgtattcatctgcaccgttatacagctctttcagctcatttttgttgtaagaaacattggcattgatattccatgtgaagtcctttgtccggatgatgtcggtatttaatgacatttcgacaccgcggttgaccatcacgccgacgttgtcccaacgagaggagtaacctccatcagagtaggacacaggaacttccatcaacatattggaagtacgtttgttatagaactcgaagtcaaagttgatacgggaaaataatcccaggtgcaaaccgatattggtggtccacaactgttcccaacctaatttttcattacctctttgagaaggggcgatacctgcttctcccatataatcaagtccgccggataccaaagccaggtggtcataattgggaatggtagagttaccggaagtacctgtactgaatgttacctgtgcgttggtcagccagtcgtatttctgcatgaatttctctttacgcaagttccacattaaacctaccgaccaaaaggtagcccagcgaccgtctacaccgaaacgggaagaaccgtccgtacggacagaaaagtctgcataataacggtcgtcatagttatactcacctctaccgaagaaagatacgtatgcataagcggcagctacatcactccaactggtagcacgtgtaccggaagtgacgttggtcaggaaatcgttattctgccctctggtacttaccataaaaccttcctgacggaagtcaacgccttcctgtccaatcataaaattgaaagaatggatgtctttcaacataaagcggtaattagccgtattggtaatggtcaggttcaatatatccgtagaacttctgccggagctaccttgcaggttgttcggtttatagcttgggaatgattgcataaacgctgactggtgagaaaaatcgataccaaattgagagcggattgtcagcccttctaatagtgtcgcctcagcaaaaagcgtagatattactttatatttcttatattttacagggttattggccatccattccaacgggttttctcctgttcctgtccagcttccgtcgttgatggaagcaagcgaaccgtcttcacgataaggattccagtaaggcagcataaagcgtgcagccggaatcggagcattcagtgcgtaaccgtttccggactcggcctgttctgtctcatcgtaggaaaacatagagtttgtgcctaatttcaaccatttggtagctttgttttctacattggcacgcatgttataccggcgaaaagttgagcctgtggtgataccatcctgatcaaagaaacttccggatacgaaatagtttgttttttctgtagcaccatttaccgacaattcataattttgcaaaggggcgctgtcattgaatacctggtcaagccagttgacattggttcttcttaatacatcataatcttttccggcatctattccgatttctttttcatattgaatgcgttcttctgtattcatcatattccatttggaacgggtcagttgtgaaaaaccgtattgtgcacggaaagttactttggctccatctattgaacgtcctcgcttggtggtgatgactacaacaccattggcggcacgagctccgtaaatagaagtagaagaagcgtctttcagtacagaaatggattcgatgtcactcggactgattgtattgaaatctgaactggaaataggtactccatccaatataaacagaggggaagtgcctgagttgatggagtttgttccacgaatctggaacgtggaggctgcactgggttcacccgaaccggatataaccataagtcccggggtttgcccttgcagtgcctggtcgaaaccggcagccggtacattttctaatttttctgattttacagttgataccgaaccagctattgtaccttttttacgtacaccgtaagcaacaactacaacctcatctaccatttcggtattatcaactaaagtcacatctaaaacatttgtttgagcattgactttaaactcttgaggctgcattccaatgtatgaaaatctcaacattgcgtccttgccttgaatttgcagctggtaattaccgtcaatatcagtaactaccccattggtagtccctttttgcaataccgaagcaccaatcaatggcataccatctgtcttggagacaactttgcctttgacaacaaatgattgcgccattattaattgaacacttaagattgctaaaaagactactccgaaaaataatcttttcattttgaaattataaattaaataaatacaggtttctttgctgttaccagaagacaatcaatgaaaatttgaaatgaatctcttgatttgatgtttttaaattttacacttgatttacagataaataagatagaaagaaaaattttcattttattaaaatatatactaattggtttgcaaaaatactataaaacagaacaaaatggtaaaaatgttatttttttaactatgataaaaatgtgcaaaaaatgacattcattgtctttgtgttatcattttcttatatatgtttttttgtgtatattcgtagtatcttagtagttacgaaatacgcatttttaaatgactttttgctaatgtgttaaaagtgttatttgcttatactaaatacatacattattgtttatactttatataattcgagaaaaatacaatatttaaattatctctagagtttacaggaggtgattttcttagttttcctacctttcttagagcagtgtgcaatattagatgaaggtatataattcttaatattatctaatcttgatatgtattaaagaaaatataaagttcggtttatggtgtcttttcggtaacatctgagttttgtattataaaccagatgatggaagaaaaaaagagaaaccattccacatagttttccttagtatttttggtcattttatatcagaatccgtacttgcgttccagataagtttcagtaaccatccattggcagtcatccagtctgaattcatattctttttccagtgttgccagatactcttcaaaatcatcgtattgttccgattcctttttctgccgttcacttaatttaatctttatgatttctcctgttgaaaactccgggagtataacgtattcggtttccatgattcggtttcctcctttattttaggttatatcttttaagcaatatactgacctgcgatgctttgaactgacatccccaggctgtcacaaatccttccttgttcaatattcttgccatctctgacaatgacttctcttcttttactagacttttcaataacgcaacagccctcttgttatttggattatcgagagccttctgtctgttggttctgttgctgttctctactgcctgtggtaatctgctcaataagttttcagatttgccaagcctgcatcctcttgctttctttgtccttagagactgttttgttctctggctgatcagtcccgcctcatattccgctatgctgctgattatatgcagtacgagtttgttcgcctccggaaaatcacaaaacactatttctacatcggattccaataatttactggtgaaagcaacgtttcggcttagtctgcccagttttgcgacaatcaggatggaacctgtttttctacatacctccaaaacttccgtaagtttgggcctgtcagatttacgaccgctttctgtttcgatagcgaccggttttctctccttcaggtaattctgtataatttctctttgtgcctctacgccaagtcctgatatttcctgtttcatcgttgactgccgtagataagctatataattcttctgttgtcccatatttaacattcaattaacactcttcccggttactaaacggacgttcaataacctttaaactcgaagaataaggtttataaaaaagactttccgtgagatttcgagttgctataaattttattctctcacagaaagccgtctttttagattctgaatttctctgaaattccctaataccttataatatcgtatgtatcggaaatcctcttctcatagtcatccgttttctccagattcctgtctatcacggaaacaaacatgtccagataaacatcttctatcactttttcttctccttcagaatcggggataagatgtatttcaaagagatcctttccttcatcgagaatgatccgcaccattcctgtatgtatgaatccctgtacatgaaattccggtccttcttcgaccggttttatcgtattcatatccactccccatgacattactataaagggctgtgtctttaggattgaccatatatatcctgccaatttcagatcataatttttgttctccatatcagtccacgttacgtccttcataaaattcttcaaaagcctgtcctctcatcagtttcttttccagacagataaagaatcttccgtatttgacatctaccacaggtccgttaccatacccgtcgtagtatgtgctgttccggcctatgataccaatccagttctccttcatgtcagcttctccgctttggatataccggaaggtgttacacatgcattcccactcttcaatagttgtaaggtggtattttcctgtctcattttgtatacgggaaaggaagtcttcaataatcttttccattgctatttgtttttgagttatttgtttcccggttaatacctctattctgtaaaagtcttcattacagctcttacattgaagtgagtaaccttttattttagatttactcggcatacgtccgcacttaggacagaatcttcctgtcttcatacattccgcttccccctttgttatatacaagttcccggctgcgtctgtttcaactttggtactggtaattctcttggtataattccatataaacttgatcatcgcccgttcttttccgctcgggctataaaccttgtataatttcttaagcaattccataattcttattttttgtgggtcaaacatttatttcattcatctcgtatgcataaggcagtcctgtttcctcatctattccgtcataaagcatgtcattcaatttatgaagttctcccgcttcctgcagtctttgtgctgactctacggatattgtcttttttcatattcacagaggatatcgttccatacctgatatatggttatgtcttctgcatgttcatatattcctcgtcatagtcggaataatgccagttttcctttttgtattcctgtgtttttgttggagtatcctgtgataatacaccactgactccgcaattcgctgttccatgacatattgttcaaggcgtcttccagttcctgtgccgccttgaactccctgctgttttcaagttcaaatctttccataattcttttctatttgatttctacaggactttcctcatatgtcaactttctgcccaatatcttttcaattgttccatcaggcaggtccatggaatattctatattcccatattcgctttctatagagttttcttcggtataacaccactcaaaaccatcaaattcaggtctgccgggtgatattgtctctttcccgtttttgtctgttgccagccatgccataatacctcctttctatcctctaataatcacgtatcttccggcggctatctcgtttctatactcgatagaatagcctttggttatagacgctcttatgacgttatcgtgtgccagctccgaaattggatgtctgttcctggcatcacttccggtattttttgcccaactatgaggccagttgtttccccagcctactccatagtggaagtagacacattcgcctttctccttaagttccgagaggatgaaagcagcaagtgcatcctcctcggattttcttctgtttgattctggaatttctattgtcaatatatttaccttgttttattcattcttgattatggtagcccgaagactaccgtattaaactccattactattattgttttaaattaaaatcctccaccctcacaggcgtacatgatagaatccacgactctgtttccatccatgtcccgttttccatctcacatgaaggattttccttggtccctttcaggatattcagatgcccgttggcaaagagaatcaatgacttcggcttttttcgaattaataccttcagttccttgatccattctttttctttttttgtcagattaatcgtttccataacgcttcttttctgttgttgtgaatttactgataaggctgtggagtgatgtttcagcctccttgtatctgcttatatctttttccggcatcgtaatcaagtacgatacaatcacggcaaaactctagcctccttatttgttgttccaatgtttcattcatcttctgtattccataagctaaattacatcaaatgacgaatcgcattcattacagtagtaaccgcgtcccggtttgtccacgatatcgtttatcgtcatttttttattccggtttgtttgactgattatgtctatgcccatttttgtttctgataccatttataaaattcaacttaaagctactgattttatcttgtctgtgacaggcatgtactctataagataagcaaggtgtccgggagcaatatcttccggctcaatatctacccggtttccccattcattatcataagtcaataatccaatacaaccatcatccagccatgctttatgaaccacaacgtccataggaccgtcatttgaattaaccataattataggcggttcatataattgttcctcatcgttttcatcatcaatccagacaaatccgccaccatgggcctccaatgccagtttcagttctcttgcctccattttcctgattttatcacacatggcgtaaaaattagaatgttccatatattccataatgatattgattttaaatttccattggttgtaattatcatatcttataccggccatacttcccattcagccactctgccgcttccgcttcgctgttgaactcctccacccaacagtcatttgtggaattgtcaaatgccacccacttttccgcctccctgtcaaagaaacggccttttgttccgccatatccgtaaatcgaatagtctccattcttaagaaggcatgacaacacaccttccgcatttttccccctgtatatcccgtccttgtccggagaatactttgatgcttctttcttttgcagttgaagttttaccttctctgcatcaaattcataattcatgcatcttttaaaatttcccattaaaagaagcaggggaaataacatcccgtgcctgcaactccttccgtgctcgtctaatgctgatttacaggtgtcacatttgtatatgtcctgtatacatgctattttcatatattttctcctttcttttttagttaaatttctgataacaaaaaaagaggataccacctttcttccctggtgataccctcctcggatatgtagttcaaatcatattcttccggtcattctataaactaggaatatgcctcgtccctgtgattcaatgcttctgtcattcctaccgaaatttccgtcgcatttacactacgtcctagaaatgaatcgagatagctgttcttatttgctcctgttataaggttgtagaacatccacatactcagttcactgttagtcccggtaaagttctcatcgtggatatattgttttgctacattgttgatctgactgtccgtaataagcagtctcggtagcatcctctgttggtgctgaaggaggtagttatacagcctcattcttcccagtatctggcagaactgtttttcactcagcattgtgtcacccagcgattgcatcaggtgaatatgttttgctacattatattgtccgaacaagtccagggtgaattgatatagtcccctcgaacttgttgctttgatttcttccttgtacccgtccgttgataaacactggttggtacaggtcagattgagaaatccgacagcgatattgaatttctgagctgtcatttttccgctcagattatcccttgcatagcttttacagcttgtgatgcataggttcagtcgatttccgtttacattccggctgatgctcggaatctattgctacttttgtatataatgctccggaaggctattgaggcatttcaaaggaaggctcatattattggttatatgaaggggctggattggaatttcaaactataaaaaatggaagaagacatgggaacggaaggaatacaggataagtatgtaatccatataccgattttggcttcaagttgctttttggtacggcaatgaataaggaattgttgattagctttttgaatgcactcttattcaaggaggaggtaatcaaggatgtcacttatcttaatgctgaacatcttggaacgcaggaatatgaccgtcgagctgtatttgatgtatattgtgagaatgagaagggtgagaagtttctggttgagatgcagcgtggcgagcagcagttcttcagggaccgcagtgtcttttatttcacttttcctattcgtgagcaggccaaacgtggggaatgggattatgagttgaaagctgtctatgtggtaggtattctgaatttctcctttgacaattctgatgaggagtatttccatcatgaggtgaagcttgtagacctttatacgcacaaggttttctatgacaagctgacctttgtttatcttgaaatgcctaaattcaacaagagtgaggatgagttggagagcatgtttgacaagtggctttttgtcctgcgtaatcttgcctctctgcttgaacgtcccaaagcattacagaacagagtttttgaccgcctttttgaaactgcggagatagcaaagtttaccaagactgaactgagtgagtattggggcagtttgaaaaatttccgtgactggtatagtgttatatctacggcggaaaagaaaggaagggaagaagggagaaaagaagtaaaaagagcgaatgctcgtaatttaaaaaagttaggaatagctattgatgtaatttcacaggctactggactgtctaaagaagaaatagaaaagttatagtgtaaatcttaaatatattctttgcgaagaggggaatacattatatataatgtgttccaaatttgttgaaccatgttacattgaatttgacgctggcgcaaaccatagcgcaaaccggaggtaaaaaagaaaaaggcacccaagagtggaagcctctcaaatgccttattcttatcaagtagcgggacccgggattgaaccggggacctcatgattatgaatcatgcgctctaaccagctgagctatcccgccatcatttctcgattgcgggtgcaaagatagatgtttttttataatctccaaaacaaatcggtaatttttttgttcttttcttcaagaaaggctttgctttcccctataagcagggagttttaggactggaaatgaaagaataattaaataaagtgcttgatttatgccgcttatttagaaaaaagtatttatcttggcacacgtaaaaacaattcgaaattgctatgaaaaaggaaaagattcatttggagtatttgttgaatgcaacgtctaaaaatattctttggtcagctataagtacaccgaccgggttggaggactggtttgccgataaagttatttctgacgataaaatagtagagttccattgggggaagacagagctgaggaaagcagagattattgccattcgctctttctcttttatccgtttccgttggttggatgatgaaaacgagcgtgattactttgaaatcaagatgacatataatgagttgacaagtgactatgtattagaaattactgatttcgcagagtcggatgaagtggatgatatgaaagaattatgggagtcacaggttgccaaattaagaagaacttgtggtttttagttaactttcaactaaaaattttcggtgctcctttttttgtgctaattttgcatcctaattgcacgaacctattaagatgctacgcataaagaaattagatatattcattgtaaagagcttttttatgctctttataggtacattcttcatctgtctgttcattttcatgatgcagttcttgtggagatatgtagacgaattggttggaaaggggttagaaatgagtgtaatggctcagttcttcttctattctgcattaacattagtgccagtatcgttgccgttggcagtgttactggcttctttgattacttttggtaattttggcgagcgttacgaattgcttgcaatgaaagctgccggcatttctttgctcaaaattatgcgtccccttgttttctttgtttgtggacttgtaggcgtttcattctattttcaaaatgtagtaggacccattgcccaagctaagttgggaactctgattctttcaatgaaacagaaatctccggaattggatattccggaaggcgttttctattccgaaatccctgattataatttaaagatagccaagaaagaccgtaaaacgggtatgctgtatgatgtcttgatctataatttgaaagacggatttgagaatgcccatattatttatgcggattccgggcgtctggagatgacagcggataagcaacatctttggttacatttgtatagtggagacttgtttgagaatctgaaagcgcaaagcatgaagtctcaaaatgtaccttatcgtcgtgaatcattcagagagaaacatacgattattgagtttaactctgatttcaatatggttgacggcgatattatgggtaagcagtcgagtgctaaagacatggcgcagttgcaaagctctattgattcgatgaaagtagtaggtgacagtataggaaggcaatattaccgggaaatagctgagggaaattttcgcgcgtcttatggattgacaaaagaagacactgtcaagatggagaaagcggatgtgtatgcgtataatgtggacagtctttataatgttgctcctttgacgcaaaagcagaaagttatttccgctgctcttagccgtgcggaaaatatggcaagcgaccttactttcaagagttatacgatggagagtaatgactatagcattcggaaacataagacggaatggcataagaagattacaatttccctttcttgcttgttgtttttctttatcggtgctcctttaggaggtattattcgtaaaggtggtttgggaatgccggtaattgtgtcggtactggtgtttattatctattatatcattgataacaccggctataaaatggcccgtgacggtaagtggattgtatggatgggtatgtggacgagtagtgctgtccttgctccgttgggtatcttccttacttacaaatcgaataaagattctgtggtgcttaatgccgatgcgtacattaactggtttaagaaggtggccggaatacgtagtgtacggcatatattcaagaaagaagttattataaatgatcctgactatgaacgtatcccgggcgatttggagcagcttacagaggattgtaaagcttacattgctcaaaatcagttgacgaaagcaccgaactatttcaaactgtggatgtcgggtgaaaaggacgatgaggtggtggctatcaatgataaactggaagcgttggtggaggaaatgtcaaatacgaaatcagcttctttgataggtttgttaaacaattatccgatgattcccgtttttgctcatgtgcgcccgttccatatatattggctgaatctggcagctggagtgattttccccatcgggctgtttttctatttccgtatctgggcattccgtattcgtctggctaaggatatggaacggattataaagaacaacgaacaagttcaattcatcatacagaaaattaataaataattgttatggaagagattaaaatggataaaatagaggatgcaattgccgattttaaagaaggcaagtttgtcatagtagtggatgatgaagaccgcgaaaatgagggagatttgattattgctgctgaaaaaataactcctgagaaagttaatttcatgttgaaacacgcacgtggggtgctttgtgcacctattacagtgtctcgttgcaaggaattggatttgccgcatcaagtaagtgataacacttctgtgttgggaactccttttacaattacgatagataaactggacggttgttcgaccggagtctctgctgccgaccgtgctgccactattcaggcattggctgatccgtcttctacaccggctacgttcggtcgtcccggccatatcaacccgttgtacgcacaagaaaaaggagtgttacgccgtgccggacatacagaggcgactatcgatatggcacgtctggccggtctttatccggcgggtgctttgatggaaatcatgagtgaggatggcacgatggcacgcttgcccgaactccgtaaaatggctgatgaatatgatctgaaactgatttctattcatgacttgattgcttatcgtttgaaacaggaatccattgtagagcgtggggtggaagtgaatatgcctactgaacatggaatgtttcgtctgattcctttccgtcaaaagtcaaatggattggagcatgtcgctttgtttaaaggtacgtggaatgaagacgaacctattttggtacgtgtacattcttcttgtgccaccggtgatatttttggttccaggcgttgtgattgcggagaacagttgcataaggctatggaaatgattgaagcggcaggaaaaggtgtagtcgtttatctgaatcaggaaggacgtggaatcggcttgatggaaaagatgaaagcatataaacttcaggaagacggcttggatacggtagatgcgaatgtatgtttgggacatcttgctgacgagcgtgattatggggtaggagcgcagattcttcgtgagttgggagtacacaaaatgaagcttttgacaaataatccggtgaaacgtgttggcttggaagcatatggcttggagattgtagaaaatgtacctgttgaaactgttcccaatccatataatgaacgatatctaagaacgaaaaaggaaagaatggggcatactttacattttaataagtaaattgcctatttgttttcatatgtcgaatattatcgcttattttgcaacgattttcactcaacaacaataaaatagatacaaaatgaatcaattatcagatcgtttgaacagcttgtcgccgtcggcgacacttgctatgtcgcagaagagcaacgagctcaaggcacaaggcgttgatgttattaatttaagtgtaggagaaccagacttcaatactcccgaccacatcaaagaagctgcgaaaaaagccatagatgataacttttcccgttattctccggtaccgggttatccggctttgcgcaatgctattgttgagaagctgaaaaaagaaaatggtcttgaatatacagccgctcaagtttcttgtgcaaatggtgcgaaacaatctgtttgtaatacaattcttgtattagtaaatccgggtgatgaagtaattgtgcctgctccttactgggtgagctatccggaaatggtgaaaatggcggaaggtactcctgttatcgtttcggcaggtatcgaacaagatttcaagattactccagaacaattggaagctgctatcactccgaaaacaaaagcattgattctttgttctccgtccaatccgacaggttctgtatatagcaaggaagaattggccggtttggcagctgtattggctaaacatccgcaagtcattgttattgctgacgaaatctacgaacatattaattatatcggtgcacatcagagtattgcccagttcccggaaatgaaggagcgtacggtgattgtaaacggtgtgtctaaggcatatgctatgaccggatggagaatcggatttattgccggaccggaatggattgtaaaggcctgcaataaattgcaaggtcagtacacttcaggtccttgctctgtttctcaaaaagctgctgaagctgcatatacaggaacacaagaaccggtgaaagaaatgcagaaagcattcgagcgtcgccgtgatttgattgtgaagttggcgaaagatgttccgggatttgaagtgaatgttccgcaaggcgctttctacttgttcccgaaatgtagctatttctttggaaagagcaaagagggccgtaagattgaaaactcggatgatttggcaatgtatctgcttgaagaagcgcacgtggcttgtgtaggcggtacttcattcggcgctcccgaatgtatccgcatgagttatgcaacaagtgatgaaaatataacggaggctatccgccgaatcaaggaagcgttggctaaattgaaataagagtccaccacagaggacgcagaggacacagagaagaaaaaatgaaaggaataatgatgtgtcgcctccttataaattagaaatcccccttgccacaaatgatttgtagcaagggggattccactaaaaggagagttgcaacacatctcccaagctattttactctgtgtcctctgcgtcctctgtggtgaaaaaaaaggctgccttcaagagaaagcagcctatactttttgttgtagattgtattattcagctgggtggatagcttcagacgggcaaacatctgcacaagttccacagtcagtacatacatccgggttgatagaatagatatcaccttcagagatagcttctaccggacactcgtcaatacaagttccgcaagcaatacaatcgtcactaattacgtaagccatttttctaagatttaaattattagtactaattttattccgcaaaagtaaagcttttattgattagttgttatgcttctatgattaaattgacttaatttgtacgtcttctaaataagcaacctccctataatctgctatatttttcgtatttttgcactcaaattactaatatatagcgattatgcctttaaatttacccgataaactacctgcgatagagctattgaaggaagaaaatatttttgtaattgatacttcccgtgctacgcagcaggacattcgtccgctacggattgtcattctgaacctgatgccgttgaagattacgacggagacggacttggtgcgtttactttcaaatactccgcttcaggtggagatctcgtttatgaagatcaaatgtcatacctccaagaatacaccgatagaacacatgaaggcattctatacggatttcgaccagatgcgtcatgagaagtatgatggtatgattattacgggagcacctgtggaacagatggatttcgaggaagtgacttattggaatgagattacggaaatttttgattgggcacgtacgcatgtgacttctactttgtatatatgttgggcggcgcaagccgggctctatcatcattatgggattcctaaatatccgttggaaaagaagatgttcggtatcttcgagcatcgggtattggcaccttaccattctatttttcgtggctttgatgattgtttttatgtaccgcacagccgtcatacggaggtacatagggaggatatcttgaaggtgccggaactgacattgctttccgagtcgaaagatgcgggagtgtatatggtaatggcacgtggcggacgtgagttctttgtaaccggacattcggaatattctccgttgacattggatacggaatatcgtcgtgacttgggtaaaggcttgccgatagaaatacctcgtaattattatgtagatgatgatcctgataagggaccgttggtgcgttggcgtgctcatgcaaaccttttgttctccaattggttaaactactttgtttatcaggaaacaccttataatgtaaatgacatcaaatgataaagcagcgtaaaatagaacttctcgctccggcgaagaacctggaatgtggcattgaggccattaatcacggtgcggatgcggtatatatcggtgctcccaagttcggtgcccgtgcggcggctgtaaattccttggaggatattgaggcactggtacaatatgcccatttgtataatgcgcgtatttatgtcacggtcaacactatcctgaaagaagaagagctgaaagagacggaggagatgattcatgccctgtatcggattggagtggacgcactgattgttcaggatatgggaatcacgaaactgaatctccccccgatacctctccatgccagtacgcagatggacaaccgtactccggaaaaggtgcgatttctttgggaggcaggtttccgacaagtcgttttggcgcgcgaattatcattgcgtgaaataaaaaatattcataccgcttgtccggagactcctttggaggtatttgtacacggagcgctttgcgttagctatagcgggcaatgctatgtcagtcagtcctgtttcgggcgtagcgcaaacaggggtgaatgtgcacaattctgtcgtttaccttttagccttgtagattccgatgggaaagtcattgtgaaggacaagcatttgctttctctgaaagatatgaatcagagcgacgagctggagctgttgttggatgccggagcttcttcgttgaagatagaaggccggttgaaagatgtatcatacgtgaagaacgtgacagcggcctatcgtcagaaattggatgcgatttttgcccgtcgtccggaatatgtccgggcttcttcgggaatgtgcagattcgaatttaagccgcaactggataagagtttcagtcgtggttttacacattatttcctgcacggtcgtgataaggagattttttcctttgatacccctaagtcgctgggtgaagagatgggaacaatgaaggaggctcgcggtaattatctgacagttgccggattgaagtcatttaacaatggcgatggagtttgctatctcgacgaacaaggacgtttgcaggggttccgtatcaatcgtgtagatggtaataaactgtatccacaggaaatgccccgtatcaagccccgtactgtgttgtaccgtaattttgaccaagagtttgagcgtgtactttcacggaagtccgctgaaaggaagatagaagtgcgcatctcgcttactgataacgaatttggcttttcgttacgattgaccgatgaagatgataacagtgtcacactggcttttccccgtgaaaaggaattggcacgtacaccgcagacggaaaatctgaaaacgcaacttgctaaattaggaaatacacctttcgaagcaaaagtgatagaagttggatttgctgataattggtttctcccggtttcggtcctagccgattaccgtcgtcaggcagttgaaaaattaatagctgcccgtcggataaactaccgccaggaattgtcagtatggaaacaaacgaatcatgcttttccgcaaacaacattgacgtatttgggaaatgttatgaacactcatgcagtttctttctatgaggaacatggagtacagcgtattgctatggcgtacgaaaaagaagcagtggagaatgcggtactgatgttctgcaaacactgtctacgttacagtatgggatggtgtcctattcaccaacgggttcgttcacctttcaaagaaccctattatctgatgtccaatgatggtaaacgtttccgtttggagttcgactgcaaaaattgtcaaatgaaagtaaaggcggcgcaatgaagactattttctatcacagaggacgcggaggacacagaggatatagtgaaggtagcatcttcactcatgcttctgacaccgatcgtttgaatgttgggcagaaaaagtgtggagattttttctctttcctctttttatcctctgcgtcctctgtggtaaaaaatgtgatgaacctgctattatgtttatttttgctatcttcctgttattatagggctccgctactggattcggaggaattgtcagagaaaacaaaagattcattgacctatctttatgaacgtcactacacgtgggatacgaatctggaagtagtggatgattccatagctttggaacgtcttccgataaaggacacttttattcaattgaataaaggagataaggtagtcgtcgcagagtttgcgattcatccggccgatagtgtggatagcgtttgggttaaattggcgcatacgcaggatgaacagggttggatacgtgaggtggatttgaagaggtcgttcgttccgaccgacagtatttcacaggccattcatcttttcagtgacacgcacgcttcttattttgttgttatttttgccctgtttgtaggcgtttatttgcttcgtgctttccggaagaagcagttgcagatggtttattttaatgatatagacagcatttatccattatttctctgcctgctgatggcgttcagtgcaacgatttatgagtctatgcaggtctttgtgccggaaacgtgggaacatttttatttcaatccaactttatctccattcacagtacctttcatactctctgttttcctgtttagtatctggttgtttctgatagtcgctttggcggtgctggatgatttgtttcggcaattgactcccgctgcagctatcttttatctgctggggctaatgtcctgctgtattttctgttatttcttttttatcttgatgacacatatctatatcggttatttattcctgatcttttttatactggtctttacgaagaaggtttatcggaacatcgggtataagtatcgctgcggacattgcggggagaaactgaaagagaaaggtatatgtccttattgcggggcaattaacgagtgatgattggcggttatcattaagcagtaggtaaactaatgtcaaagcattgataaagttccgttaaagtgctggtatagttgcgggaaggtaccgatacctttacctttccacggccgtggtgacttcttcccacagccgtgatgagatctctccacggccatgaagagaagctaccacggctgtggagagttaagaatagcgtaagtctaatggaacaataccgattgggtaaataaagtataacggctttataatgcaaactttatagggacatacgtccttttatcccgtattccatgctgttgatctacaaagagacaggctgacaataaaagtccggaacttttattgtcagcctgtttttagttattgtcagcgtttattgtcagttgttaatctgttgaaaaccattgttttgtgtggatgaaatctttagctgacaataaaaagactaaataatatccttatgagtaaaaatgattagaagcggcagcgaagatctatcccaaattgcattggacgtcctttctgcatgaaacctttgttcattgtttcgaaatagaaggcggcatagtctttattcaagaagttgcgtgcccaaaaactaatcattgcatcaccgatttccagattcgttctccagttgagcgtgccgtagaaggattggctgacgtcgttcagttcagtccagtagatacgtccggcagcgttatagttcgcctggaatacaacccggtcgaagatagaacgtgggctgcaggtgatgacatattctccaccgatatttaatgtatgcttggggacaaaaggaacatacttgccattgtaatcggctctaactttgagcgtttcttcatcttctctctcatattcgatatagtctgtaaaggtagcgtaggtatatccgtagcttgcgttcagatttaattcattagtcagacttgcacgaagagacatttcggcaccatagctgcggcttttccctgcattgacggtggtacgtcccaagccgcttccggtgaattgggaaatttgttggtcgcgcatatccatatagaaagcggaaagatctgcccaaagcttaccctcccaaagggtaagatggcttcctacttcgtagttccatgaatattcgggtttgtagcgtgtcgcctcttttacttcgggtacatccgctttcttggcatatttgtcaatcattgcagcaaatctggcgaactgctcgctctcttttatagcatttatcatggagttctgtaaatctccactaataagatcggagaacatttgtacgttgtagccgcccgaccgataccccttcgacacggttgcgtatacattattgccctttttccattcatattgcagagcaaacttaggtaacagttggacataatcatctgatattttaccgtcataaccggcattggcaatcaggttcttggcttctactgatacagatggtattggtggccgtgacgccatcttcatactgaagttgaagtctgtagggtcactgatcgatttatacttcatgctcatcttctcataatccagacgtactccgacagtaagagacaagcctttcacaaaaaggtcattcaatgtagactgatggaaaacagctgcattccaaacaggagtatcaaagtctcctcctaccaacagagtaggattgttgattgctaaatgtaatttcggggcgtttgcaggcataccggcaaaggctgtatttgcacttccttcgataacatctttcaccccgtcttcccaaaaagtcaccggacctttggtgttcaaggactgatacagtccgaaagctcctgttgcccattgccatcttttgttggattttgatttaaacacgatctcttcggaaactgtattcgacttttgcttctgttccagtgtataaaccgctcgttctgtaaagtcttggtcgaggaacatacggtcattcagattctgatagccggtaactgcactgaggatgaaatttcttgcttgatattccagattgacgccggcattcattaatccccgacgataactgctgcgctcgttatatgaaatcttaccaatgtagtctgcacggtcttctgtgagaggttcttccctttcttttgcgctgggagcgattccggtatagtaataggggtatccaccctgatcgctatattcatagttcaggtttatatctactttcagattggaggtcggtatgtaaaccccacgaaatcgtccacctccggcattgcttcggtcaaccttctcattatttcgtgctgtgttctcaaagaatcctccggtatgttcgtaaaatcctccggtagaaaaggcgaaccgttcggatatacggtgataatgggtaagcgaaacattataattattgtacgtcgccgctcccatgcggatgtcggtcccttgataggtgaaaggagattttgtgtgtaccttgataagtccgcccatcgtgttacgcccgtaaagtgttccttgaggtccgcgaagtacgtcgatacgttcgatgtcgcagtaattgaaatcgaaggcggatttgtctatataagggatattatctacataaagtcctacggacggtgtgttgatacgtgaaccgattccacgaatatagatggaagtcgttaatttcgagccataatcagggatgaacaggttgggaacaatacctgtaaggttcttcacggaatgaacctgattggcacacatattttcctgtgataatacggtggcggctataggcaattcacgtagtttgcgattctctttcggagtggctattactaccacctcttccatatccactactttcagtgaatcttttgggaaatcttcgccccatacagttcctgacgtcaggagggtgagggcaagcatcataatctttgtcttcattcgcagtttatttgtccggtgcaaagtaacggcaaatatagttggcaggcaatcctcatttattaggatttgattcaccacagaggacactgaggacacagaggtataataggattctaaaaattctgtatcctctgtgtcctctgtggtgaattagatgcggtcggcttcgatatatccgttcattacagcataaatagtcagtcctgaaacggacttgattcctaatttctccgtaatgttctttcggtgtgtaatgacggtagttaggctgatattcagtttgtctgcaatttctttattgatcagtcctttggtaatcagtacaagtacttcgatttcgcgggcagataaaagttcctgatgatgcgctggcggaatcattggcggcatatcctttaccgggtatcctttgtgatgggcatgttgatggagtttcaggatatttttcaccagctcctcttccggctcataaatattgagaaccggtacaccggaaagttgaaactgcggactgtcactggccagaacaattgtttttcgttttcggggaagaaagaaagcattgtgttccacatagatttgtgccgatatgaaataatgggcatacatatccggtgtgtcatccattaattcattgaaacggtggaaagtacgaatggtagccatcgggatgatttcttccaatatggatttgagtcctaaactactgagtgtattgggttcaatgattgctatttcgggttgggtagtcatcagtttgctgggttttgattaatgatgtaaataattagcagcggcttccgcacaccgttctccgtctattccggcagaaacaatacctccggcataacccgctccttctccgcaaggaaatagaccgcggacggttatatgctgtaatgtttccttgtcgcgtacaatgcgtacaggcgaagaagtccgtgtctcgacaccaatcattaccgcttcattagtcagaaatccgtgactgctacgtccgaattgctggaaaccgagagataaccttttactgatgaatggcggcaaccaaaaatgaagcggagaagaaataattcccggactataagaagattcgggtaaatcgtagctcaatttcttacgggtaaaatccatcatacgttgtgccggagcagtctgtcgtcttcctccttgcaaccagcattgacgttccagctcctcttgaaagtgaagggggagaagttgagagttgagagttgaaagttgagaatgattgagagatggattgatagcgagcagccgctcattctgttgcgcagccaactctccactctcaattctcaactctccacttcttaaatcttccggttgaatttccaccaccattccagagttgctccaacgtgagccacgattggatggagacatgccgtttactaccacctgttccggtccgctggcggcaggaacgatgaagccaccgggacacatacagaagctgtatactcctctgccttctacctgtgtcacaaaactgtattcggcggcaggcaggtatttgccccgtccgtttttattatgatattgtatttggtcaatcaacattgcaggatgttccaggcggacaccgacagcaatccctttcgcttcaactgtcacattattggcggccagccaacgatacacatctcttgccgaatgtccggttgccaagatgaccggtccgagaaacgtctttcctgtattcgtctcgatacctttgacttcatcgttctcaataatcaatgcatccattcgtgtctggaaatgtacttctccgccacattcgataatggtgttccgcatattttcaatgacacgtggcaacttgtctgttccaatatgcggatgcgcatctactaatatcgaggtcgaagctccatgctggcaaaatacattcagaatcttatctacattccctctcttcttgctccgggtatagagtttcccatccgaataagctcctgcacccccttcgccaaaactgtaattcgattccgggtcaaccgtgtgttccctgctgatctgtgctaaatctttttttcgctcgcgcacatcttttccgcgttcgataacaacgggacataaccccagttcgatgagacgcagggctgcaaatagtccgccaggacctgcacccacgacaatcacttgcggttttccctctaccttattatatatagtatgttcgtattcatcttcttgaggcatctcattgatgtatgccctcaccttcaaattgacgaagattgtccgttggcgtgcatcaatactccgcttcaagattcgggtagcagtgatgtcacgcagattcaaacctttttctttagaaaggtattcctttaatttctgttcgtttacagcaatttcggggaggatgcggagttggtattcttgtatcatattttttcaccacagaggacacagaggtcacagagtttaaatttttagataataaaacgtttgattccttgttttaaatgaggaacattgaaatttattaatagtccatattttagatggccaagtttcatatatgtcaatagttgggcagaatgtaccggttgtagcatttccacacttttcaattctataatgagttggttgtctatcaacaaatctattctgtaatctgtatctaattgggttcctttatagattataggtaatttcttttgtctttctacatctatatcgtttgctctcaattcatagaataagcagctttcgtatgtactttcaagtaaacccgctcccaattgagtatgcacctcaaaagctaatcccagcactttactcgttaaattattaatatcttctatcattatttatttacttgattaatcactcctccgtgtcctctgcgtcctctgtggtgaacctaaccgaataaagccctgaacgcctcttctacttttctcaccggtactaattctatcttcagtttttgggtatcgatcccttgcaagttatatttaggcagcaagaaacgtttgaaacctaacttttcagcttcaccgatacgctgttcaattcgattcacaggacgtatctctcccgacagaccgatttctcctgccatgcaaacttccggttcgatagccgcatccatattcgaagaaaggatggcgctgataacagacaaatcaatggccggatcattaactttcaatcctccggcgatattcaggaatacatctttctgagccaacttaaatcctacgcgcttttcgagaacagccagcagcatattcatccttcttaaatcaaaaccggttgccgagcgttgcggatttccatagacagcagaactcaccaaagcctgcgtctcaatcaagaacgggcgaattccctcaatggcggaagcaatggctaccccgctcatcccctcatgatcctgacttagcaaaagctcggaaggattgctgacttggcgcaacccatcctgacgcatctcataaatacctaactctgccgtactaccgaaacgattcttgatactgcgtagaatacggtacatataatgttggtcaccttcaaattgaagaactgtatctacgatgtgctccagcactttaggtcctgcaatgcttccttccttattaatatgcccgatcagcaacacaggtgtatgcgtttctttcgcaaaacgaagaatagacgccgaacactctctgacctgtgcgatacttccgggagacgattcgatactctcggtagaaatagtctgtatggagtcgatgatcaccagatcgggattcgtattcttgatatgtacataaatctgttcgagggaagtctcgcaaacaatgagacagtcactggaaatagaagagagacggtcggcacggagctttagttgacgtgcactctcttcgcccgagacataaagaatcttcttttccggcatgtgcaatacagtctgcatgacgagcgtagatttgccgattcccggttcaccgcctatcaggaccagagaacccggtaccagtcccccgcccaatacacgattcaattcgtcatcgtgcatattgatacgcagttcgtcatccgccactatatcggcaagcgcaagcggtttgggcttttgcgtttcaatccccgacacaggacggcggttgaccggctcttttctcacaatttcttctacatacgtattccactccccacaggacggacatttacctacccatttcggtgaatcctgtccgcaattactgcatacatatacggttttctcttttgccatcgaacttcctttcttcgttgtagggtacaaaaatagggataatttattagaaataagttatccctgcctaatagaaatagatgtatgcctatatagttatctctccggctatcgaacggttcatccggtcacgcacttcatccggggtatatccgtgtcctaataagaacattaatttggtgacggcggactccattgtgctgtcgtaaccggagacaacacctgcctgcaatagttgatatcccgtttcatagcgttccatctccaccattcccgcactgcattgtgtcacattgacgattacaatcccttgtgcgctggcctggcaaagtcttcggataaaccactctttacggggagcattgccggaaccgtatgtttcgagtacaatcgctttcagcccttcgattcctagaacagtagcaattacattttcctgaattcccgggaatagtttcagtacagccacgttcgtatccagcagatagtgtggtttcaacttatgttcctctccattcgcatggatctgtacattattatatttgatatgaattcccgcctccgccagtaccggataattgaatgaccggaacgcgttgaaattctccgcattgattttcgttgtgcggttacctcgcatcaagtggttttcaaagaagatgcagacttccggtacgagcgcctttccctccttgttccgtgcgatggcaatctcgatacttgtcatcagattctctttcccatccgtgcgaagtacccctatcggaagttgagaacccgtcaggatgacaggcttgtccaacccttccagcataaaactgagtgcggaagcggtatatgccatcgtatccgtgccgtgcaagattacaaacccttgatagcgttcatagttgtcatgaataacatgaactagcttttgccacatatccggttccatatccgaagaatccatcggcggatcaaactgataggtgtctatcggaaagttgaatttctgcaattcggggatgtgcttttggagttgttcaaaattgaaattctccaatgcacctgttgcggcgttctcaatcattccaattgttccaccggtgtatattagcaatacggaagtatttatagggctcataagctgattttgcgtatttgtattcgcaaatatactaatataaatgatatatttatagcaaaatgatataaaagtgaatctctgctgcaataagggattactatgaaatattctttttatcagaaaaaaaccgaaaaaagtgatagattgaacgtttttattattacttttgcgacacttatcaaaaacaagagtagaaacaaggactatgatgaagtactatccacatacagtcacatccatgtgtaccatgacccttaggggttgatggatagtttttgtgtatctacgtgattcacgcctgtataagcaggcaaaattcaaattcaattttattcgtaaataaccaatcgttctgttataacatatacgcacaggacattgcatttaaataagtatcttcatgaaagtaatgaaattcggcggaacatccgtaggttccgtgaacagcattttaagcgtaaagagaattgtagagtcggctgctgagccggtaattgtagttgtttccgcattgggaggcatcacggacaaattgataaacacgtcgaagatggcggcaatgggagattcggcatacgaaggcgagttccgtgaaatcgtttatcgtcatgtggaaatgattaaagaagtgattcctgtcggtgaaaagcagacatcattgcaacgtcagatcggagaactgctgaatgagttgaaagacatctttcaaggaatctatttgattaaagacctttctccgaagacatcggataccattgtaagttatggagaacgtctttcctctatcatagttaccgaactgattgagggggcgcaatggttcgattcgcgcacttttatcaagactgaaaagaaacataataaacatattctggatgcggaactgactaatgaactggtgaaaaaggctttcagctcagtgccgaaggttgcattggtgcccggatttatctcttctgataagacgacaggagatgtgacaaacttgggacgtggcggttcggactatacggctgccattatcgctgctgcgctggatgcgaatagtctggaaatctggacggatgtagacggtttcatgacggctgatccgcgtgtcatttcaactgcttacacaattaccgaactgagctatgtagaagcgacagaactttgtaacttcggtgcgaaagtagtttatccgcctacgatttatccggtatgccataagaatatacctattataataaagaatacgtttaatcccgatggcgtgggaacggttatcaaacaagaggtttccaatccgcaaagcaaagccattaagggtatttcctctatcaatgatacgagcctcattactgttcaaggacttggtatggtaggggtgatcggtgttaactaccgtatctttaaggcattagcaaagaacggaatcagcgtgttccttgtatcgcaggcttcttccgagaacagtacttctatcggtgtgcgtaatgccgatgcggacttggcttgcgaagtgctgaatgaggagtttgcaaaagagatcgagatgggagagatttccccgattcttgcagaaagagacttggctacggtggctatcgtaggtgaaaacatgaaacatacaccgggtatcgccggcaagctgttcggcacattgggacgtaacggtatcaatgtaatagcttgtgcacagggtgcttcggaaacaaatatctcttttgtggtggatgcaaaatctttgcgtaagtctctcaacgttattcacgactctttcttcttgtccgaataccaggtactgaatctctttatctgcggtatcggtacggtaggcggcagtctggtagagcagattcgttgtcagcaacagaagttgatgatggaaaacggactgaaacttcatgtggtaggtatcattgatgcggctaaagcgatgttcagccgtgacggtttcgacctctccaatttccgcgaggaactgaagcagaaagggaaagacagcaacttgcaaacgattcgtgaagagatagtaggcatgaatattttcaattccgtatttgttgactgtacggcaagtgcggatattgcatcgttgtataaggatttgttgcagcataacgtctctgtcgttgctgccaataagattgccgcttcgtcggcttacgagaattaccgtgaattgaagacaatcgcccgtcagcgtggagtgaagtatctgtttgaaaccaatgtaggtgcgggacttccgattatcaacacaatcaacgacttgattcacagtggtgacaagatattgaagattgaggcggtgctttcgggtacattgaattatatctttaataagatcagtgctgatatacctttcagccgtaccatcaagatggcgcaagaagagcgttattccgaaccggatccgcgtatcgacctcagtggaaaagatgtaatccgtaaattggtgattctggcgcgtgaagcgggctatcgtatcgaacaggaagatgtggaaaagaatctttttgtgccgaacgatttctttgaaggttctttggatgacttctggaagaaagtgccgagtctggatgcggactttgaagcccgtcgtcaagtcttggagaaggagaacaaacattggcgttttgtggcaaaactggagaatggaaaagcctctgtcggcctgcaggaagtcggagccaaccatccgttctacggtctggagggcagcaacaatatcattctgctgactacggaacgttataaagaatatccgatgatgattcagggatacggtgccggtgccggtgtgactgccgccggagtttttgccgacatcatgagtatcgcaaacgtttaattaagttgagagttgagacttattaaaatgaaacatattatcatattgggagacggaatggccgattggccggtgaagtcattagggaacaagacgctcctgcaatatgcaaagacgccttatatggataagttagcccgcatgggacgtaacggacggttgattaccgtagccgaaggtttccatccgggtagtgaggttgccaatatgtccgtattgggatatgaccttccgaaagtgtacgaaggtcgcggaccgctggaagctgccagtatcggtgtggacttgcaaccgggtgagatagcaatgcgttgcaacttaatttgtgtagagggagaaatcttgaagaatcactcttcaggacatatttctactgaggaagccgacgtgttgataaaatacctgcaagaaaatttgggggatgaccgcgtacgtttccatacgggagttcagtaccgccacttgctcgttattaaaggcggtaataaggaattggactgcacacctccgcatgatgtgcctttgaagcctttccgtccgttgatggtgaaaccgttgatgcctgaagcacaggaaacggcggatctgattaatgacttgattctgaaatcgcaggaactgctcaagaatcatcctttgaatttgaaacgtatagccgaaggcaaagatccggcaaacagtatctggccttggagtcccggttaccgtcctcagatgcctaccttctctgagacttttccgcaagtcaagaaaggggctgtgatttcagcagtcgatttgattaacggaatcggttactatgccggtttgcgccgtattgccgtagaaggagctaccggactttataatacgaattatgaaaataaagtagccgctgccctcgaagctctgaaaactgacgattttgtttatctgcatatcgaagccagcgatgaggccggacatgaaggagacatcgacttgaaactcctgacgatcgagaatcttgataagcgtgccgtaggtcctatttacgaagctgtgaaagattgggacgaacccgtagcaatcgctgtgttgcctgatcatcctactccttgcgagcttcgtacgcatacctccgagcctgttccgttctttatctggtatccgggcattgagccggatgaggtgcagacgttcgatgaggtggctgcttgtaacggtagttacggtttgctgaaagaagacgagtttataaaagcattcatgaatttcacactcaccgcagattacacggattaacacagattattttctcataatttctaatctgtgtgaatccgtgtaatccgtggtgaacttaaaataataacaatgaaatattatagtaccaataaacaggctccgatcgcttctttgcaagaagcagtcgttaaaggccttgccgcagacaaaggtttgttcatgccgatgtccatcaaacctcttccgcaagagttttacgatacgattgatacattgtcttttcaagagatagcgtatcgtgtggccgatgctttctttggagaagacattccggcagaaacgttgaagcagattgtatatgatactttgagttttgatgtaccgttggtaaaggtatcggagaatatttattccctcgaactcttccacggtcccactttggcgttcaaagatgtaggcggtcgttttatggcacgtctgctgggatactttataaagaaagaaggacagaagaacgtaaatgtgctggtggcgacttccggtgatacgggaagtgcggtggctaatggattcttaggagtggaaggtatccatgtgtatgtgctttacccgaaagggaaggtcagtgagattcaggaaaagcaatttactacgttgggacagaatattactgcgctcgaagtagacggaacattcgatgactgtcaggcattggtaaaatcggctttcatggataaggagttgaatgaacatctttctttgacttccgctaattccatcaacgtagcccgttttcttccgcaggcgttttattatttctatgcatatgcccagttgaaacgtgccggaaaggcggacaatgcagtgatctgtgtacctagcggaaacttcggaaatatcacagccggattgtttggcaaaaagatgggcttgcctgtgaagcgttttattgccgccaacaaccgtaatgatattttctatcaatatctgcaaaccggtaaatatagtccccgtccttccattgctaccattgccaacgccatggacgtgggcgatccgagtaactttgcccgtgtgctcgatttgtacggaggttctcatgcggctatctcagccgagatttcgggaactacttataccgacgagcaaattcgcgagacagtgaaagagacttggaaagatcatcattacctgcttgaccctcacggcgcttgtggttatcgtgcgttgatggacggcttgcaaccaggtgaaaccggagtattcttggaaacagctcatcctgccaaattcctcgaaacagtagaaggtataattggcgaggctgtggaaatccctgccaaattgcaggagtttatgaaaggagaaaagaagagcttgcctatgtctaaagactttgcggacttcaaaaagtatctactagcgctttaatcgtatggaagttttgtcttacgaggaaatttaaaatacggcttattgtcacttgttggttgtaggagatcccgatgcgtttcggcctaaaacctctctggtgcagaaagcgtgtcgtctgacacagtccgacaaattgaaaagcgtcaagttattatcccccaatcctgtaatgaaggtgtggttgaaacgggaattgggggcatagtcttgtcttaatgagcaagataaacaagatactctcctatgcaatggattgtgaattgattggctgtagcctcattgagtgtaccttgccaccaattgctaaagtcactgagaggataaaccaattcttctcctttcaatccttttgctccgaaattgataatggaaacttgctgaccgggatgcgactcgaatgtctgtgtaccgctggcgggcataaatacaccgtaatcggtgatagtcctgatttccagattctctttcatatagtctatgagcagactgatatttcctaatgtatgatcttcccgtttgccggtggctcctacaatggcaatcttccgatagcctttcttttgcagaaacaggacagctttggtctggtcgttcgtctcttggtcggctatccggtggatgataggagcaaacaattccttatattccggtgaaagggagtcaccgtcgccgataatcacatccggagtatgtccgcgtgaaatatattcattggctgccccgtcacagcaaactacgaattttgcctcttccaacattcgcaaaggaagaggatgggtaggatattcgccattggcaagtatcacagcctcaggagtatagtgctcgtttatcattgtacgctcattaatcttttccatttaaagtagccaaagatagcgataatggaataaagtccgtataaagcagaggtgaaataaaggtctttataaatataaagtccgcaacagacaatatcgacaagaatccaggcaaaccactgttcgatatacttgcgtgccaacatccacatacccacaatacttagtgccgtagtgaaactatccaaccacggcacgttactgtcggtgtactcgataagtatccaggcaatgccgaaaaaagaaatgataaatacaaagaaaagagggagataatatctacgcggagtatggacgatagaaagttgttgcaatttatcattttctcccatggcggcagattcccggctttttccttttcttcgtccccacatccagaaaaaccatccatagaccgccgctatcagataatagatattgataccgaagtctgcatacagccccgctttgtaatagacgaagatgtagatagcaggcatgatgatacccgctatccaaagatagatgcttgctcggtattccaaccaaaggtagactaaaccgactactgtaccgaacatttcaaggaaattcatatccatcattcgagcctgtattttatttaaaaacggagggtgaggtgtgccagaatattggtacctgccatcgggtagaagcgtggatcatgctttatcgcatacgtttttgtcttatccccattctcataaagtgccacactttgggagtatccatttgtctcatatttcgtattgaacaagttatagacggtagctcctatcgtgattcgctttgtgtggcgggttttaaaggagtaagaggcactcaggtgattgacgaaataagcgtcgagtgaattctcttttgtaccgaaattgtcgagatactggcggctgacatattgtgactggagagcaatttccagtccgttgcttccgagagtaatcaggctgtttccgatgaaagaaggagagaaggcgatcggagtgtttccaccctcgatagctgtctgcgtatataagtcatcgacaatctcaccattcaccaggctttcatcatacacgtaacctacgtagttcttgatacggtttttgctccatgtgccgttaagatcccaacgcagccaatcattgaattttgcgcctaatgacaactcgacccccatgcgatagctgtcttttacgttctctgccatcgcttcgcctatatcattggtctttccgttcaataccaactggtctgtgtaatccatataatacaggtttacaccggccgtaaaccattcactacggtaggtatatcccaactcataatccaataacttctccgctgtgggatgttcgtcaaacattccatccgtataattgttgcgggtaggttctttctgagctaccgagaaagaggcgtatgtgctatggtttggattgatttgccagaaaagtccggctttcggattgaagaagctgaagtgttctctcacatccagtcgctgcaaacgctcgggggtagcggtgaagtcccatttatcattatccccatcaatcgtataacggatataacggtattgcagatctgcgtaggcactcaggctgccggtcagttggtaattggctttcaaatagacattcccgtccgtctttccgccgttattacggtaatactcatgttccgggtcgagttgttcggtataattctttacccacaaaacttttccataatggtcgttactgtatcggttgagtccgccgcctagcgaagcgttcagtctttcattctggtaattcagagagaagataccaccgccgaaatcactatccaccaacttctggcgtacgagattggttttcttctgcggttcgctgttatccggcaggtagaaaggcttcaaaccatattccttcaatgtgcgtccgttcttgtattcctgataataaccgaagccattggtataatggaaagcgatattcagattccatgccggagagaagatatgattgaatagaagttgataatgtgtctgtcggtaattatccgtttgatcatcataaaagccgatcggattaccttttcctttattatcatccagaatgactccgttcggattatatgtccggtcgttctccagttgttctttactgataccgtcccaagcatgataagtcttctcctttccaccgaaagtgataaacttgatcgttgtgctctcaccgaagtaaccgccttgcacgaaatatgatttcaggtctgatgaggcgcggtcgcggtatccgtcactctggatattagagagccgcgcatcgaatgcccaatatttgttaatcagcccggttccgactttgaccgtttctttgtgcgtgttgaatgaaccgtaagagccggaaacttcggcgtatggttgggatgaaatgctttgcgtacgcatattgatactggcgccgaatgctcccgaaccgttggtcgatgtgcctgctccccgttgaatctgcatatcttccagagaagaggcgaagtcgggagtatttacccagaagatggcgtggctctcagcatcgttcatcggaataccgttggcggtgacgttaatacgggtagcgtccgttccgcgaacgcgaatcgtagtatatcctactcccgccccggcatctgaggttgtcagtacggaaggagtggtagataataggaatgggatatcctgtccgaaattctgtttactgatctgttcttttcttacattggtgaatgctaccggagttttcaccgtagcacgcgtggatactacctgcacttcttgcaggtttacaactttcagactgtccgctttagcactcgtctgtgcatggacagcgaagcctgcgcccgataaggcgatggccatcataacaattcttttcatcttgcttatttgttagttctctacgccggcattacccggttcagattctatgggtatgttctcagcccgtcatgttaaggcacccctactagtgaatcggatgcaaaaatacagcatttacaggaggaaagcaaaaaaaacttttagatttgctaaaaacaatataactttgcaattcgttgaaaaggacaaacaatcatttattcatttaatacatttagattatgttactattattccaagcaacacaagctgcggattccgtgcaagtggccgcagatgagctgatgaaagaggcgattgccaacgctgaaggtttggacaagctttcattgataacccagcaactgatagacttcggtattcgtgccggagaacgtatcctgatagcggtcattgtttttattgtagggcgtttccttatttcgatgctcaaaaattttgtagggcgtttgatggataagagaaaggttgatataagtatcaaaactttcgtccggagtttggtgaatatcctattgactatcctgttgattatttcggttgtcggtgctttgggagtagaaacaacttcgtttgcggctttgctggcatctgctggtgtggctgtcggtatggcgttatccggtaacttgcagaactttgccggaggactgatcgtgttgctgttcaaaccttataaagtaggcgattggattgaaagtcagggtgtttcgggtacagtaaaagaaatacagattttccacactattctaactactgcggataacaaagtgatttatgtaccgaacggagcgatgagtagcggtgtggttaccaattatagcaatcaggtgactcgtcgtgtagagtggattgtaggaatcgattatggagaagattatgacaaggtacaggaagtcgtttatgggattcttgctgccgataagcgtatcctgaatgaacccgccccgtttgtagctcttcatgcattggacgcaagcagtgtgaatgtagttgcgcgtgtttgggtgaacagctcagattattggggagtttatttcgacattaacaaggctatttacgaaaccttcaatgaaaagggtatcaatttcccgttcccgcagcttacagtgcatcaaggctgattattataccgtatataatagaaaacgaaagagtctcacttttgtggaactctctcgttttatttagaacaatagtctggtgtgattgaatgaatttacttttatttaataccgaaatcttcggctagctcgtatctgtcttctttaatccctagtacgtgattgattttccttcttttttcaagatccttgaagtaattttctacgacctgatagagattaaagtttgtagtagatccggcggctaaatcgagtgactccactagcttttctacggcttgatggattttctctgcgtctatcagatgcagttcgttgctgtgtattaaatatttttccatgactgcaatgtttttaatgttatataggtataacatcttgcagtcatggaaagttcaatgattgaatgttagattttcgcaagcgcctgatccagatccgcaatcaggtcatcgatatgttccgttccaatggatagacgtacggtgcccggataaatctcctgttcggctagctcctgtgcattgagctgtgaatgggtagtgcttgccgggtggatcaccaatgatttcacatcggcaacattggcaagcagggagaaaatctccagactgtcgatgaagcggtgtgcttcttcttgtccgccttttacctcgaaagtaaaaatggaaccggcaccgttcgggaagtaacgttgatacagtgcatggtcaggatgattggataatgacggatggttcactttcttcactttcgggtgattgtttaagaaattcactaccttcaatgcattttctacatggcgttctacgcgcaaggaaagagtttccaggccttgcagcaggataaaagcgttgaagggactgatggtggcacctgtgtcgcgcagcagaatagcacggatacggatggcataggcagccggaccggctgcatcaacgaagcgtacgccatgatagcatggatcaggttcggttagttgtggaaatttgccggaagctacccagtcgaatttgcccgaatctacaatgactcctcctaatgaagaaccatgtccgccaatgaattttgttgcagaatgtactacgatatctgctccgtgttcgatggggcggattaaatacggagtaccgaatgtgttatcaataattaaaggaattttgtggcggtgagctatttcagctactgcctctatatcaatgatatttgagttcggatttcccagtgtctcgataaatacggctttcgtattttcctgaatggctttttcaaagttcgataaatcacttggatcaacgaatgttgttgtgatgccataactgggtaaggtatgagccagtaagttatagcttcctccataaatagttttggctgccacaatatggtcgcctgcacgagtgatgttctcgaaagcataagtgatagcagcggcacccgaagcaactgccagccctgctactcctccttcaagagcggctacgcgttgttcaaaaactccttgagtggagttggtcagacgaccgtagatgtttcccggatcctgcaggccgaaacgtgcggctgcgtgagcggagttgtgaaatacataagaggtagtctgataaataggtactgcacgggcatctgttgccggatctgcttgttcttgtcctacatgaacttgtaaagtctcgaaatgtaatttctttgttgccataatcgtatgttttttaagtttatattcttcctttattttcttgcaaagttatgggatgtagatatatcgaacaatatatagcttaaatatagaaaataatgctatttttgtgccgttatatggaataatgtaactgcgttattcctaaaaatcaccttttagaagaatatttttcttatggatacttttgataaactggatagagtcgatttgcaaatactccgtactttgcaggaaaacgcccgattgacaacaaaagagttggctgcacgggtgagcctttcttcaactcctgtttttgaacgtcttaaacggttggagagtggaggatatataaagaagtatattgccgtgttggatgcggaaaagctgaatcagggatttgtcgtgttctgcagtgtgaagcttagacgtctgaacagggatatagcagccgagtttacacggatcatacaggatattcctgaagtaaccgaatgttataacatatcaggaagttatgattacctgttgaagattcatgctcccaatatgaaatactatcaggagtttattctgaatgtgttggggacgattgatagcttggggtcactggaaagcacgtttgtgatggctgaagtgaagcatcaatatgggatacatatttagttcgttgtgtgatagtctgaaatttatcttgtatatttgctacccgatatccgcagttgataagtaaagctatatctatggatcatcgcagaatgataatgcccggaatacagaatccttgactctgtacactaagaggatgcggttatgatgcaggttctggagtgttacctactgaaaaggagcaggaacaattccggatgaaggttgtaaaagttttattttattcaatggttttaaaccggaagcctgtttttcttataactttgcaacagattttagaaaaaggagtttgggatgataaataaatatgaagaacgactggggacagagcgcatgttaccgcttgtttttaagatggcacttccggctgtggcagcgcaatttgttaatttgctttatagcatggtcgaccgtatttatattggtcatatccctgggattggtacggatgcattggcgggtgtaggagtaacgacttctcttgttatactgatttcttctttttcagcgatagtaggaggtggcggtgcgccgttagcggctattgcactcgggcaaggggatcgttcacgtgccggaaaaattctgggtaatggttttatcctgctgatattattcaccttgtttacttctctcatcgcatatatctttatggagccgattttactttttacaggagcttcggaaaatacattggagtatgcagtcgactatctttctatctatttattaggaactatcttcgtagaaatatccacaggattaaattcctttatcaatgcacaagggcgtcctgctatcgccatgtactcggtattaataggagcgctgttgaatatcgttctcgacccgattttcatcttttggctcgatatgggagtaaaaggcgcagccctggctacagtactttcacaggcatgtagtgcagtatgggttttaactttccttttctcccggcacgcctctctccctttggaaaaacgttacatggcgttgaaccggaagataatactttctatatttgctttgggcgtatcaccgtttattatggcaagtaccgaaagcctggttggctttgttctgaacagcagcctgaaagattttggagatatttatgtcagcgcattgaccatcttgcaaagtgcgatgcaatttgcaagtgtccctttaacaggatttgcgcaaggtttcgttcctattgtgagttataattatgggcacggcgataaacaacgtgtcaaagactgtttccgtgtcgcattgataaccatgttctcattcaacttactgctgatgttgtttatgattcttttcccctcaacagtagcttccgcctttacgagtgatgaaagactgatagaaacagtccgctggacaatgcctgttttcttgggtggtatgactattttcggattgcaacgagcctgccaaaatatgtttgtagccttgggacaagcaaaaatttctattttcatagccttgctgcgcaaagtaattctgctgatcccattggcattgatattgccacaccttatgggagtagccggtgtatatgcggctgaagcaatatccgatgcgacagcggcaatttgttgtactttgttgttcttctggcagttccccaaaatattgggaaaaatccaaaggagcgctttgcgcataagctaaatttcctgatgtttatccataaatagaactagttatgtaactgcttacgtatttttgcgaaaaatgtttgttcatattataaaaagctaatgtatttccaaagtatctctcatggaaagtggtcgtctcatcattatttaacaagagaaacactatgaaatatcagtctttcttaaaccacctgtaaaaccatttacccaccttttcataatgccgggtttcggtatcagtgtatagcttagaaaagaatgacgtatctaatggttctcccgattggttaggatataatacgattaagctattgttggagaagtatttgctaagctgtctcggtagtttctcaaaagaactgtcgtaagagagagttcccggtcgtgcgctgataatgactaataaatggtcatagcttacttgtcctgttaataccagcaagtcattccaatcttctaaaagagagaaatcggttagcacctgtttatgctttttctttatcaatgtttgcaggtgggcggttgtcttttcatttgcaaagaaatgtacccggcaaccgagcgtgcttcccatccggcagaaatgttccatccaacggggaaagccggattcatattctgctttcggtgggacggcaacgacaatccgtttaagcgtgtgaaccggtatcaggaatttggaaataataagctcacagttcaatcttttcagcaggtgtccggcaagtacaccgaaaaatgaatccgtgatgtttgccttgtggtgcaacccggtgataatgcttgttatctcattctctttggcggaatggataatgccggaagcgatattcaagtcataacgggtaatttgtctcaacgggacgttgaccgctgttgtcatcatagccgctttttccagataacgtttgctccgcattctcagattgtcggaagtgttatcattattgattacattgattgccaatagattatctttcaatttcgggtcacgtataactaaagaaagatttaccatatcttcgatggtgttcggattgttaagagccactaagatcttttccgtttctgtagccgaagaggttttctccggttcagagtcgtctatggcaaccttcttggctgcccgttccgttatcagcgaacttaccacacaggttaccagaatcagtagtactgttccgttcagtacatcgtcattcagcaggcgttctcctccgggcaggataatgttatatcccaccagcacggccgccaatgtagccgctgcttgtgcggtactcagcccgtacattagctttcgttcaagagcagacatcttgtagatcttctgtgtcagccaacaagcgatccatttgccggtcagagccattataatcattacggcagccactttcagcgcatctccgtgcccgaagatgacgcgaaggttaatcaacattcccactccgataagaaaataaggaatgaaaagcgcattgccgacaaattccagatgattcattaagggggagacgtgcggaatgagccggtttaataccaggcctgccaggaaagctcctagaatcccttccatacctacgaactccattagtcctgctcccaaaaagaccatagccaggacgaaaatgaattgcattacattatcattgtaccgatggaagaaccagcgcccgacacgtggaaaaacgtagatgataaacgtacctagaaagatgacttttattaccagccaaatccagaacagcccccctgtctcccctttgaatagtccgcctacaacggcgagaatcaacagtgtgagtgtgtccgtcactgcagttcctcctactgcgatacttacgctgcgatggcgtgatacgccaaagcgtgtgacgatgggataggctacaagggtatgtgacgcgtacatactggccagcagtacggaagtgattacaccgtatttcaggtacgatacatttgccacaaatcctattcctatggggacgataaaagccagtaatcccagtactaacgctttgtttcgtgtctccttgaaatctcccatattcatttcaaggcctgccagaaacatgatgtaatagagaccgactttcccgaatagctcgaaactgctgtcgcgtgccagaatattgaagccgtgctcaccaattgccagtcctgctaggatcattcctataatatgcgggatacgcagtttgttcaataggataggggcaaataatataataaggagtacaaggagaaatatccatgtagggtcggtgatagggagtgttaaatcaaggccaatccaatccataagttgataagttcgtaatattcttcgcgcaaaataacttaaaaaaagtcttttaaaaaagcattcgttgataaaatactcctttgtaccatataatctgtatctttgcttccgatttaaaccaactaacaatttagaaaaatgaaaacagcgttattggcattaggagttttgtgtattatgggcagttgctcgtcggagatgaaaagttccaaagggattgtttgcgatgcgtcaatgaatacggtatccattgttacggataagaatgacacgctttcgtttagtacgatggatgcgaacaaggaacaagttgacggtttgcttttgaatgatacattggaagtattttatgcagggaaatatacaccgggaatgcaggcttccaaattggttcaatatccgcaggctccccgattgggcggtgaccgtgatgagcacggttgtatcggttctgctggatacgtatggtgtgaagtacaaaaagactgcatccgtttatttgaaaaaggtattcgtacagaggctgttaacggaggcgagacttctgcttttatcgttttcagtcccgattctacacgtgctgaactcttcttctcggataagcaacccaatgaaatattggaaagacgtagtttgccgtcgggtggctatgcgtggaatgtagaagacgatgatacaaagaatgtgcgactggtggacggcttatggacaatcagtcaaagaggtgatttgatttatactcagaaagctgagaacaaataatcagcggaggaagagtatcggtatgactactaattcttttttacagcatcatctccttttccgttttcgtcagatggacctagctaatgtagaattaccactctcttatgtcaaaaagcttcaccatagaatataacttacgttatttagtgagcattatatagcacaagaggatagtcgaaaaggtctgttaatcctgcttgactatataaaatatagttaacacaaaaaaaaacaaaccgactataaccttccaaaaatatactccagtagtacttacaacagagaagttaaagacgacttcttaatgttagcaaaaaaatttctggaaatacttcttccattctgcctttttcaatcccataaaattcagttccagaattcgtatagtgaaacaaccaggcacactgctttccatgaaaggtattccgtctcgtatctgaattggtttacgaatcatgccagctttagtcagcgttccattatctagattattttccaagtccgtgtcattattatcggtgatatataagtaggttatttctccttgagaatcaaattctgctccccaaatgttaatagcgtgtgtctgccttccaaaggaatgggcgcatcctatggctttttgtccggatagagcttcttttatgatttccgtaaaacgatagcgaaaagattgacacgtttcgcataccgagcaattttcaccaagcacttccttaaagaaaccggcttcctgtttagctccgttaagaaactttccggtgaagaaccagtttaatgcagcagccacattattaccagtattcgagaaattttttttgtaaaaatcaaacacctcacaatccaacgaaccattatagcgggatggcccgtcatatccaaacctatttacatattccttgttttgttccaaccaccaataaatgatattggatacagaagcagcccaacaaaggttattatcactattgggttgctctccccatacatcttttttattacaatcaaaccaaccgtatgctttattccatttcagcccccgcaccttgcttggtgttaagtacgcatactcccacatttgtggatccggcatacctgtgagaccatgtgtccataccacttttctggcccattcttgcggaatctccggttcaggatcgggatcaggcttctccggttcgggatcaggatcaggtttctctggttcaggatcaggtttctctggatcaggatcaggatcaggtttctccggatcaggtttttcattctccggatttatttcttccagcggaggaataatcacttcatcaagaggttcatccttatcgcatccatcaagaaaaactgataaagagacgattgaaagaacaagaataaaaattttgaatcgttccatatctattatataaggttctaataataaattttgcaaaaatacaaataaaccactcatgttccaaatctatagaaatgagtggtttataaaatacaatttctaactaaatagtataattaattatttctgataaacagtaacttcagtaatattgatgtagtctgcttctttaatagggatatccatctcaatcttaatatattgtgcttttacaggaactaagaagataaagtcagatgcaccattcttttcaacagcattctcgatcgttcctactttagtccaagtggaattattactagaaagagaaatcgtcacttctttatagaagttgcttggattgctaccaagatatttaactctgataccagagaaagtttgagcattctgcatatctacagtaaaaaggaaattgcttcttggtacaaacctcttagcagcaacaaatatttctatagctttgttactatcgttaccgtctaccaagctattttcgccatattttattaagttatcaggaaaacggctactgagaatagctatttgcacaatttcagtttgaggaacttcattatcttcttccaatgcaatttctgtatgtcccagttcaatcaatgtttggggatacatcttaaaatcagtaaaatgttctttgttgtaggtgaccaaatattccggatcgatggaaacttgagcattcatttctctattggcaggtttacttaattccacacgtatgtaagtagcatagttcttaaaaaaatcttgattatataattcaacaacagttatctgactaccggattgcgcgtcacagattgcaaaactattatctttatagatgccctcatattgagattcgtcaacaggcttccctaaatataaatcatcctgttcacaagcagagaacaagcagattcctcctaacataaagatgattcctaaaccttttttcatatatgttcgtttcatattttttcgtattaaatttaatattatttttttcaggaagtgcaacagaaacccatgtcggatttcccttttcagcttcaagtgtatttccgttacccgaatgatctttgatagtcttgccatttccttcgttgaatttccaataagccagtaatccgtctgtagatccttctacattggtatccaagaaatagatgaagaacagcaccgaaaatgagttgttttgcatagccatactctttgtttttgacgttgtaaaattactgtttttaacgtgagttggatttgtgcaaaatatagatattcaatgagatataacccaggaaggtggacgtttttcggccggaaatcaagtccaccttttcgtccacctcgtaaatgccgtaaaggggtcaatgtaaaaacctgaggggtaaatttataaattgttatctttgtctccaaattcatagcttatggagttaaacggttatcgccttcttcttcctgaaggcactttagactactttgatcttgttgatgtgaaggaaagtgtaaatgaagttgtgttctaccttgaggagaaaaatatcgttcctgagaagtatacagatcaggatactgagagtaaaggcttttatgaccctgttattgttcaggattttcctctccgtggcaagaaggtcttccttaatattcgtcgtcgtcgctggctcttaaagaagcataatgagtatatctctcgtaactggcgtatggtggctgaaggtactcgtatgacgcaagattttgcgtcttttttaaaagaactatattgatagctatccgatcagttgcaagctcttaggtgttttatatggagttgacggggatttattggagcgtcaataccgtaaccatctaagtggttatctccattgggaccaacttgttcatgcagaggattggctactattcgaaaagaatatcggtgcttatatctgtattgatgaggtagccctctcgcgtggggaactctatactgtactgaccaataaagaagctcacggtggtaaaggtagtatgattgccatcattaaaggtacggacgttcatacggtcacttctgtcctgcttaagctctcccgtcgccgccgttaccaagtgcgcgagataaccttggatatggctcctaacatggagcagattgcacgcatctgctttccttcggccaaacgtgttaccgatcgctttcacgtacagaagttagcttatgaagctgtgcaggagatgcgtgtaaaagctcgctgggaggctttggatgaagagtccactcagattgcttatgcaaaggcctgtggaaagatgtatcatgcacctgttttcgctaatggagatacaagaaagcagttgttagcgagaagtatttatctgctttacaagaaggaatccttatggactcagtctcaaagaatacgggctgaaattcttttcaaggaatatcccgatataaagaaaggatattatctgtctatgcggttaggcttaatctatcatcagtgtaagtttaaggatattgctttgacaaggctggcaaggtggtatgatgaagtagataaatcagggttcctcacctttggaagggtctcacgttctatacaaacacattatctgaatataatcaatttctttgaaaggagggcaaccaatgccgcagcagagtcattcaatgctaaaatcaaagcatttagagcacagttcagaggagtaagagatagagcttttttcttatatagacttgctaaattatatgcttaaatatagaatccctcagattgttacgttgacccccgtaaagtgcctcaatttgccgttttgtagaaaagaaaaaccgttgataatgattgattatcaacggtttatgttaaattgctttttgtttgagtgatccgcctggggctcgaacccaggaccccaacattaaaagtgttgtgctctacctgctgagctagcgaatcaatccttattgcaaatcacttatttcctgattgcgggtgcaaaggtagctacttttatttaatttgcaagtattctgcagaaaaaagttttaattattttatctctttatggtttatttcttgattatcagttatttctgcttcttcatattttatcttttctttattgataataaaacgttggtagtaggaaagcattaaagtcgttagcggcagagcgataatcatgccgagcattcccatcaatgaaccccagatagagagagacaagagaatgatggcagggtttaggccggtgatctttcccatgattttggggacgaggaaagtatcttgtatgatttgaacaacggcgaagacagccaatgcacatgcgatgatgatccagaaattctctccggtatccgcagctttgagaatagctagtaggacggtaggaaagaaaccgatgatctgcaagtagggaaccatattcagagcgccgatgaagagtcccaaagcgatagccatcgggaagtcgataatcaagaaacctatgctaaaaagaatacctacgcaaaaagcaactagtgcttgaccacggaaatacttattcatgccatcctgtacgtcacgtaccagattggatgcaaatgtacggtacttattcggcaacagatgcaaccatccttcggctattgcttcataatccaacaatataaagactacatataataatatgataaaggaggtaaagatactgaataagatattgagggattctgcaagcaatgtccacaatctgggtacggtatccttgattgccgccaggatattctcctcacttaatatacggttcaatgcttgaagatcaacatattcgtgaatgaactcggagagattcttaggtacattgtttccggctccattggtgagataagtcactaataaatcgttcattctgctcatttcggaaatcatgggcggtactagcaaataaaatacggtgactccgatagcgctaatcagaaacaaagcacagaaaatggaaaggatacggcttttcaaccgtagcttatattggaagagtttgactagcggataaatcatataagcaatcaaccaggcaatgaagaaaggcagtaacactccgctgagacgttctataagcatcaatattcctattactaatacacatccgatagaaccgcgtatgaaactgtcgaatgttatcttctttctttccataatctgtttttatttatagagtttatatttgcttttcgtcttctttgcgcgcacggagataacattccctacacaaaggctcgtattcggacgtttcacccaaaagaacctgtttttcatttttcactgtacgatgagagaaagaggccaactgtccgcattttacacagattgcatgaactttggaaacttcgtcggctatggcgcataattgaggcattggtccgaatggattacctttgaagtccatatccagtccggctacaatgacgcgtataccgttattagcaagctgattgcatacatcgaccagcccactgtcgaaaaattgtgcttcatcgatacctactacatctatctcggaagtaaacagcaggatactggctgatgaatcaataggagtggaggcgatggaatgactgtcgtgagagactacgtcttcttccgagtaacgtgtatcgatagccggtttgaatatctctacacgttgtttggcaaactttgctcttttcattctacggattaactcctctgtctttccggagaacatggagccgcagataacttcgattctacctcttcttctcgtctcctgtatgtggtcttctgaaaataataccatgtgattttgtgttttcttgattaaataatatgcggacaaaggtaagcaattcaatgtgcaagaactgttaaattatccattattttaagttattgcataatttattcctacattcgcatcatattaacaatagactagcatgaaacagaagttgttaacggatattgagttggatgttcatgggttgaagtatctgatggatttatattctaaagaaccggctaaggctgtgttggaactgttgaaacagaacattcttcatatgcagggatgtttggatgaggtattgcaggaattggaacctgttcgggaaaatgcttctgttccttgcgggaatgcttctgaacctgtggtggaagaggtgatagtagagacaaaagtgtcggccgatactgagacggaggaagttaagccttcttctgtattgggcgaaagtataaagacctctgtcggcttgcgtcattctatcagtctgaatgactcttttcgtttctcacgtgaattattcggaggggatgttgagttgatgaatcgtgttgtggagcaactgtcagctatgagctcttataaaacagccgttgcattcctttcttcaaaagttaatttcaacgaggaaaacgaaacattaagtgacttccttgagttattaaagaagtattttaaccaatcagcataagagaagaatgggaaagctatatgtagtgccgacgccggtagggaatctggaagacatgacctttcgggctgtcaaagtcttgaaagaggtcgatctgattttggcggaagacacacgcacttccggaatcttgctgaaacattttgaaataaagaacgcaatgcaatcccaccataaatttaatgaacataaaacggtggaaagtgttgttaatagaataaaggcaggtgaaacggtggcattaatttcggacgccggaacacccggaatctcagatcccggatttttggttgttcgtgaatgcgtgcgcaacggcattgaagtgcagtgcctgccgggagcgaccgcttttgttccggcgcttgttgcatcgggattgccgaatgagaagttctgttttgagggattccttcctcagaagaaaggacgacagacacgattgaaggcattggcggaagaacgccgtactatggtgttttatgaatcgccccaccgtctgttgaagacgttgacgcagtttgccgaatatttcggtatggagcgtcaggcaaccgtgtcgcgagaaatatccaaactccatgaagaaacagttcggggtagtttggctgaattgatagaacactttaccgctaccgaaccgcgtggcgagattgtgatagtattagcaggaatagacgattaaaataacttcattaaaaaaaacgtaaaacgtagacgtatgaaaaagttaacagttttatttgtgtgcgcagccatgttggcttcgtgtgatagctttaaaggtggaaataaagacttgaaggctgaaaatgattctcttttgatggaacttacccaacgcaatgctgaactggatgatatgatggggactttcaatgaagtacaggaagggttccgtaagatcaacgctgccgaaagccgtgtggatttacaacgcggaacgatcactgagaattcagccagtgcgaaacagcagattgcttccgacatcgagtttatatctaaacagatggaagagaacaaagcacagattgccaagttgcaggctcaactgaagaatagtaagtataattctactcaattgaagaaagcggttgaggctttgacaactgagttaaatgcaaaacaacagcgtattgaagaactccagactgaattggcttctaagaatatacgtattcaggagttggatgctgccgttagcgatctttctgcagaaaaagaaacattgactgccgaaaacgaggcaaaagctaaaaccgttgccgaacaggaaaagagcctgaacgccgcatggtttgtattcggtacaaaatcagagttgaaagctcagaagattcttcaaagcggagatgtgctgaaaagtgctgatttcaacaaggattatttcactcaaatcgatatccgtacaactaaagaaattaagttgtactctaagcgtgccgaactgttgactactcatccggcaggttcatacgaattggtgaaagacgataaaggtcagttgacattgaaaattactaatcctactgaattctggagtgtatccaaatacttggtcatccaggtaaaatagagtagatatcacttttgaatggccggtgtgctgattcctgaatttaagaaatcggcacattggcttttttgtttcttattatatactcactaactactgatgaaatataaaaatcttttttttgatcttgacgatactatttgggccttttctcaaaatgcccgtgacacttttgaagaagtgtaccagaaatattcatacgaacgctattttgattcgttcgatcatttttatgcaatttatcaaaagagaaatactgaactctgggttgaatatggtgaaggaaagatcacgaaagatgaattgaaccgccaacgttttttttatcctttgatgtcggtaggggtggaggatgaagcattggcggaacaattttcgaaagatttcttttctattattcctactaaaagaggcttaatgccatacgcaaaagaggtgttggaatatcttgctccgaagtataatctttatatactttccaacggttttcgtgaattgcaatcacgcaagatgcgttcggcaggtgtggatggttattttaagaaggtgattctttcggaagatctcggggtgttgaagccttaccctgaaatatttaattttgctctgtcggccactcagtctgagttgcgggaatcattaatgattggtgacagctgggaagctgatattaccggagcttatggagttggaatgcatcaggttttctacaatgtgacggagcggactactttcccttttcttcctacttaccacatccactctttgaaggaattaatgactttgctataggcttgttagtgtgaactatacttcatgatttgtgccagaactcgtttttcaccacagattatacggattaacacagattaaaatccgtgcattgataatctgcatttatcatctgtgttaatccgtgtaatctgtggtgatgtggtgaattatgctatgtttgtgtgtgggtagtatcactcattcttttgtgaagcggctttttcgaggtcacgtacgattgtgatgtccattatattggcatatacctgagtggtttttacacttttgtgtcccaacaatttttgtacggtagttatatttgcaccgttatatattaataaggtagcattcgtgtggcgggctgtgtggaaagaaatgtgtttgctgattcctgccaatttggctagtacattcagttccttgttaagattggaattatcttttaacttgaaaaaactattgaggtcattcttgtagcggtggagtatatgaatacctttgccctcgaataacaggtataatggaaggcgtacctcagtgcctgttttgacagatttatagataagccaaaattccttatgaaactcaatgatattctcggaggtcaggtgagtgaaatcagaatatcgtaaccctgcgtaacaacaaaataaaaaggcatctttgggcttttgtaattttgcaaacttctctgtgagttgaacttcttccagtttatgcaattcttcgggagacaaatgggtatgtctgccttctacacttttgattctatattttctgaaggcatatttctgtatatccatatattctttattaatagcaatattgacataacgttttagatgtttcatgtgcttggcaattgtattaagatgatatccacgagattgcaggtaagaatcgaatgaagaaacaaattcaaatgtgaggtctgtaaagaagatctctttcttgaacgcttgaagtaactcgagggtggaaagatgattgtgcttggtactttctttcaaagaagaggttgctagttcttctttatagaaatctaaaaaagacttttcgttgcttacaggtttcttaagtaagttctttaataaactcaacgaaatctcttttccctgttgccacaatccgagttctgtttgctctattgtagatatatattcgtataacatacagtttaggatgtctgcattaggatggttctttaccattttccgtttgtcgtcccattggtttggtttaatatagattttagtggagagatacatttttttcttattaaggtaagcttccacttgtattaatgccattcctctcttattcaaattcttttttctgttaaacacaaggttgtaactaatcttttccatatttctgtttttttattgatgttagaacaatttagatgtagttctgtgctacatcggtgatgaatatgcattaatatctctaaaaagattatctttttttgctatatttgcacccatattattattaaaaataaagaatgaaagaatttgtaatatccgaagccaaagtagagacagcaatactggtcggactcatcactcagacgcaggatgagcgcaaaacgaacgagtatctggatgaattggcattccttgccgagacggctggggcggaagtagtgaaacgatttacacaaaagttgccgacggctaactcggtgacttatgtagggaaaggaaaactggaagagataagaacatatatccgtaacgaagaggaggaagaacgtgaagtgggaatggttatctttgatgatgagctttccgcgaaacaaatccgtaatatcgaagccgaattgaaggtgaagatacttgaccgtacttcgctgattcttgatatatttgccatgcgtgcccagactgccaatgctaaaacacaggtggaattggcgcaatataaatatatgctgccacgcttgcaacgcctttggactcacttggagcgccagggaggtggctccggtgcaggtggcggtaagggctcagtgggacttcgtggtccgggtgaaacacagcttgaaatggaccgtcgtattatcctgaaccgtatgtcgttgctgaaagaacgtctggcagacattgataagcagaaggctacccagcgtaaaaatcgcggacgcatgattcgtgttgctttagtaggttataccaatgttggtaaatcgaccattatgaacctcctgtccaagagcgaggtatttgcggagaataagttgtttgcaacgctggataccactgtccgtaaggtaattatcgagaatctaccgttccttttgtcagatacggtcggatttatccgtaagttacctaccgatttggtggactctttcaaatcaacattggatgaggtgcgcgaagccgacctgttggtgcatgtagtggatatttcccatcccggatttgaagaacagattgaagtggtaaataagacactggccgagattggcggcggtggcaaacccatgatacttgtatttaataaaatagatgcttacacttacatagagaaagcatcggacgaccttaccccccgaacaaaagaaaacttgacactcgaagagctgatgaagacgtggatggcaaagatggaggataattgcctctttatttccgcccgcgagcgaatcaatatggacgaactgaaaaatgtagtttatcaacgagtgaaagaattgcacgttcagaaatacccttataacgattttctttatcagacctacgaagaggaagaataaataacactttatttatatgaaagactatcgtagattgactgaagatgaggtacttcagttgaagagccaatcgtgtttggctgatgattggggaaatgttttggttgccgaaggctttaattgtgagttcgttcaccatacccgcttttcgggagaagtgaagttgggcgtattcgagtctgagtttacattgccgggaggtatcaaaaaacattcgggattgcgccatgtgacactgcacaatgtaacagtgggggataactgctgcattgaaaatatccagaattatatagctaattacgaaattggcagtgataccttcatcgaaaatgtagatattattctggtggacaagttgacgactttcggcaacggggtagaagtagcggttcttaatgaaacagggggacgtgaggtgctgattaatgataaattgtctgcgcatcaggcttatatactggcattgtaccgccatcgtcctgagttgataaaccgcatgaagtcgattgcggattattattccaacaagcatgcttccgctaccgggagtatcggagagcatgttatgattctcaatacggggtctattaagaatgtccggattggcgactattgtcatatttgcggaacgtgccgtttgtctaatggtagtataaacagcaatgtgacagctcccgtacatatcggacacggagtgatttgtgatgatttcatcatctcctccggttctaaagtggatgacggcactatgttgagccgttgctttgtagggcagtcctgtaaattgggacataactattctgcttccgattctttattctttagtaattgccaaggagagaacggtgaggcctgtgccatctttgcaggtcctttcacggtgacacatcacaaatctaccttgctgattgccggaatgttctcatttatgaatgcaggatcgggttccaatcagagcaatcatatgtataaactcggtccgattcatcaaggaacaatggagagaggagccaaaacgacttctgattcctatatcttgtggccggctcgtgtcggggctttttctttggtgatgggacgccatgtcaatcatgccgatacttccaatcttcccttctcttatctgatagagcagagaaatacgacctatttggttccgggtgtcaatttgagaagtgtcggtactatccgtgatgcgcagaaatggccgagacgtgataaacgacaagacccgaatcgtctggattatatcaattataaccttttgagcccttataccatccaaaagatgttcaagggacgttccattttgaaagaattgcgacgggtgtccggtgaaacttcagagatttactcttatcagagtgccaagatcaaaaacacttctttgaataacggtatccgtttttatgagatagccattcataagttcttgggtaattcgattattaaacgattggagggtatcaatttccaaagcaatgaggaaattcgtcaacgtttgaagcccgatacggaaatcggagtgggagaatgggtggacgtttccggactcattgctccgaagagtgagatagaccgtttgttggatggaattgagaatggtactgtcaaccgtttgaaatccatcaatgcctgctttgcggagatgcacgagaattattacacctacgaatggacatgggcttacaataagattcaggaattttatggtataaatccggaaatcatcactgctcaggatgtgattcgtattgtaaaatcctggcaggaatccgtagtgggactggataaaatggtgtatgaagatgcaaagaaggaattctcgctctcttctatgaccggatttggtgcggatggctcgcacgacgagatgcgacaagatttcgaacaggtgcgcggggattttgaaagcaatacatttgtgacggctgtgttgaaacatattgaggagaagacagccttggggaatgagcttatcaagcgaattgagactatcgtagaataatcgaaatattctccgttattcattcttaattctttattcatcattcgccattcttcattcttaattgctacctttgcaacactaactaacattacgtaataaaataagaaacttatggcaacacctccgtttaagtatcagcccatgtttgaaaaggggaaagatacaactgagtattatctgcttaccaaagattatgtgtcggtaggcgagtttgaaggacatcctatcctgaaaattgagaaagaaggtttgactgcgatggctaatgcggcttttcgtgatgtatcattcatgcttcgtcgttcgcacaacgaacaagttgctaagattctgagtgatccggaagcaagtgagaatgataagtatgtggcattgactttcctgcgcaatgcggaagttgcttcaaagggagttcttccattctgccaggataccggtactgccatcattcatggtgaaaaaggacaacaggtgtggacgggttattctgacgaagaagctctgtcattgggagtctataaaacatataccgaagagaatctgcgttattctcagaatgcgcctctgaatatgtatgatgaggtgaatacgaaatgtaacctgcctgcacagattgatatcgaagctaccgaaggtatggaatatgaattcctttgtgtgaccaaaggtggtggctcagccaataaaacttatctctatcaagagactaaagctatcttgaatcccggcacactggttccgttcttggttgaaaagatgaaaacattggggacagctgcttgtcctccttatcatatcgctttcgtaattggcggtacttctgcagaaaagaatctgctgactgtgaaattggcttctactcatttttatgataacttgccgacaacaggaaacgaatatggtcgtgcgttccgtgatattgaactggaaaaagaagtattggcagaagcgcataagattggtctgggtgcgcagtttggcggtaagtatttggcccacgatgtgcgtatcatccgtctgccccgtcacggtgcttcttgtccggtaggtttgggcgtttcttgttcagccgaccgtaatatcaagtgtaaaatcaataaagatggtatttggattgagaaactggattcaaatccgtgtgaactgattcctgcagaattgcgtaaggcaggagaaggtgatgtggttaaaatcgacctgaaccgtccgatgcctgaaatcttgaaggaactgactaagtatccggtggctacccgtctgtcattgaatgggactattattgtgggccgtgatatcgctcacgccaaactgaaagagcgtttggatcgtggagaagatttgcctcagtatatcaaagatcatcctatttactatgccggtccggcaaaaacaccggaaggtatggcatgtggttctatgggaccgactactgccggacgtatggacccatatgttgacttgttccaaagtcatggcggcagcatgattatgttggcaaaaggtaaccgtagccagcaggtgacagatgcttgtaagaagtacggtggtttctatcttggttctatcggaggtcctgcggctattctcgctcagaataatatcaagagcattgagtgcgtggaatatccagaattgggaatggaagcgatctggaaaattgaagtggaagatttcccggcatttattctggtagatgataaggggaatgacttctttaagcaactgaaaccttggaattgtactaaataattagtctataattcttttatataaaccattattggagggatacctgtctgtttcgtataggtatcccttttttactaatttccctttctattactagccataatgaaaacatcgacagttgaactacctaatcagaagaaccggcatattgtatggctggacgttgtacgttttatcgcaatgtttacagtcgtttgctgccattgcgccgatccttttaatttttatccgggcactgctcccaatatcggagagattaaattatggggggctatatacggatctgtccttcgtccatgtgtgccgttgtttgtgatgataacaggagctttgcttttacctgtgcgaggtgatactttcgctttttacaagaaacggattacccgtgtcctgtatccgttctttatctggtctgttatttataatctttttccctggataacgggttggctaggattcagtccccagattattcttgatttctttccttatgccggtgaagaagtaatgaggcaatctttctcggttgctgtcaaatatatcttgaatatcccattcaacttttctatattggcagtacatatgtggtatatttatctgcttatcggactttatctttatttgcctatattttcggcatgggtagagaaggcttcggaacgtgccaaacagatgtttctgctagcttggggagtcaccttgctattgccttactattatcagtttgttgacggttatttatggggaacttgctcatggaactcatttggaatgttatatgcctttgccggattcaacggatatctgctgttaggccactatttgaagaatcttgattggagcatgaaaaagacattggcaaccggtatcccgatgtttgtgatcggatacgttgtgacgttcttcggcttccgccatatgacagctttaccggattatacggatgagatgttagagctgttctttacctattgctcccttaatgtggtaatgatgaccattcctgtatttatgctggcaaaaaaagtcaatatccgttcagaaagaatacggaaggcattagcaaaccttaccgtatgtggtttcggagtttatatgattcattatttctttaccggaccggctgtaatgttgacgcgggctattggtatacccattcctttgcaaataccggtagcggcagtaatggcatttgctgtctcctggttgattgtgaatctggtacaccgtattggtaaaccggcaaaatacataatgggataaatctctctcttattcctccaaatattttgttatctttccgctgatttgtaacaatgagatttcgcagattttggtgttatattcagcggaaaggatacgttcttccgcatccaacaaacttttttgtgcttcacgtacctcaaaaccggaaaggtctccctgtatataacgatccattgcaatatcgtgattgtctttagctgttataagattctgtcgttccagattcaataactgaagattgttacgataagcttgccataaattactgaggtcggaacgtagtgctaattcaagattctgtcgttccagttgacggttcttaaaagtaagagttgcattccgcttttcacggcggcgattaccgtcgaatatgttgaagccgacagttactcctgcgttaaatcccagatttcctcttctactagtggcattgatgtcatacttattgaaagtatagccatatccggtatttaatttgagatatggatagttgcgtgaattcactttcttgtagtccaattgggctaaagtcgtattctggtcagctttcaataaagaagcattggttgccaacgtagaactccatagatcttcaaatctcaggtcgctatgcacttcgatagtggaatctttgataataacaatttgattgacatcgttattagccattaactcattcaattggatacgtgatgagtgcagtaattcctgttgtttgatgtattgagcgctatccgcattgaagtccacttttgcttgctggtaatccaaccctgaaaacttaccgacaagatggctcgcttctgctatacgcaggcgttcttttgagagcgacattgcataatggaagtttttcagacgaatcttttgttggataaagttgtagtactcggctgtcaagtcggctataaagtcctcgatggcaatacgggtattcgtttccccttgtcgttccaactctttaagttgtttgtaagtcgtgctgatattgaatccgtcgaaaatagtccaattcaggttgaggcctacgttgacagtctgatcgtagacacccttgtttttggttatttctccggtttcacgtgctttgctttcaatattgtccagattccctacataaccggcagagaagtccaaagtaggtaagtagcctgcattacctggcgtcgcattatttttgctgatctgttcctcgttgtggacaatacgcaaagagtaattgttctgcaatccttcctccagacactcctttaaagtaagtacttgctgtgctttgactgcagaaacggaaaaggcacatgcagtgattatatatacgatacgtttcatacaaatatctttcggtttcattcttttagttttttgattcggttagtcgaaatataactgtaaatggccggtacgatgtacatcgtgagaagagtagagactaccatacctcctactactgccgtacccatagcaatacgttggttacaaccttctccggtggcaaaggcaagcgggataagtcccaaaactgtagaagcgcttgtcattaggatcggacggagacgttgtaaggccgcatccttgattgcagtcattttatcttctccggtttcctgtttctgattggcaaattctacaatgaggataccgtttttagccactagaccaatcaacatgatgataccgatctgactaaatatattcattgtgataccactgaaatacatgaatactaatgctccggcaatggctaaaggcactgtcagcatgataaccaacgggtctttgaaactttcgaactgtgctgccagaatcaggtaaattaggagaatagccaggataaaggcaaacatcagactggaagaactttcacggtattcctttgagtctccggacagagctgtacggaaagtatcatccaatgtttcttttgctatcttgtccatttcgtccaaaccttgaccgattgtttttccatcggctaagcctgcagaaatggtagccgacacaaaacgattgtaacggtacaatttaggaggagcaataccatcttccaattcgatcaggttgtctagctgtatcatgtctccattattgctgcggatatagatcgctttcagatcggccggcttatttcgctgttgtcggttgatttctcccaagatctcgtattgttttccattcatatagaaataccccatacgttgtccgcttaatccatactgcaaagtctgagcaatgtttttagtacttactcccataatgctggctttatcacggttgatttgaatacgggcttccggtttactgaacttcaagtcaacgtctgccatctgaaagaccgggttttcatacacttttgccatgaatttgggcaatacctcttccagtttttccagattggtagcttgaagaacgtattgaaccggcatacttccgcgacgaccgccgaaagaagactgttgctgcacaaacgaacgtgccatcgtctttttctgtaccgctttcgatattttctcggctacttccatttgggtgtagttacggtcctgcatatctttcaaagtaatacgcacgttaccgctaccactggaaacacgtgcagtcacggcttcggcgtcaggaagaatggaatcgacaagttggttgatatcttctgtgtaatctcggatatattcataagtcacaccttctgcaccacgagtgttgatgctgatttgtgaacggtcctccaaaggagccatttcggccggtactatattccacagaattccgatgagacatatagtgatgaccgtgaaaggaagggcaatccagcgtttgcgaaggaaagcagccaatgaacggctatacaggcggttcataccctcaaagaaaggttctgttttcgcatagaaccaactctgtttctcccgttttatcagtaatttggttgccagcataggcgtgaaagtcagtgcggcaaatgaagaaatgataaccgaaccggaaatcacaatactgaattcacggaataatcgtccggtcataccatccataaagacgatggggaagaatacggcaaccagtgtaatggttgtcgagatgacagcaaagaaaatttctttagctccttctattcccgcctctttcgggctcattcctttttctatccggatatagatgttttccgtcattacgatagcgtcatccaccaccaatcccacagacaatacgatggcaagcatagaaagtacgttgatggagaaaccagccaggtacatgacgaagaatgcaccgataagggagacgggaatcacaatacaaggtaccaacgtaacacgccaatcgcgcaggaagaggaagataatgatgataacgagtacgaaagcttcatatacggtggactttacttcattgatagatgcacggataaatttagtgttgtcgaatccgtaattataatgtacatcttccggcaaatcctttttcatttgctccatacgctgatatactgcgtcggcaatttcgatatggttggcacccggttgcggaatgactacgacacctaccattggtacgccattcatcttcatgtaacttttgatgtcggcaggacctaattcagcccgacctatgtcactgaaacgtacgatgcggttatccgattccttgataatcaaatcgttaaattcatcagctgtatgcatcaatccaagtgttcggattgtcagttcggtagtatttccctcgatactacctgacggaagttccacgttctcattgtctaccgcattttttacgtcaatagggctgataccatagcccgccatttttaccggatccagccaaaggcgcatggaataacgtttctctccccagatagaaacgctacttacatcggagatggtctgcaactgctccttgactgtcaggtctgcgatttcgcttaactccaatagcgagcgtttgtcgctctgtaaagcaaccattaagataggttgtgcatccgcatcagctttcgatacggtaggagggtcacagtcacgcggtaaataccgttgtgcacgtgataccttatcacgcacgtcgtttgcagcggtttccagatcgacggacaattcaaattctacagtgatacggctctgtccttgttggctgacactggataaagagcggatacccggaataccgttaatattctgttccaacggctcggtaatctggttctcgataacgtcggcatttgctcccggataagagcaactgacagagatgatcggattatccactgacggatattcacggacacccagatagttgtatccgataaatccgaaaagtaagataatgatggttagtacggtggctaataccgggcggcgtatgcttaattcggatatgttcatagggcgcaggtattaatcaattttgtcaagcgttacggcaagtccggtacggagttgcagtgttcctgaggtgatgatggtatctcccatgtgcaacccccttattacttgtacttcggatgcggtacgaataccggttatgatatccaccggttcggcttttcccgatttatataaatagaccttatctttacccatttccggtacaattgcttctgtggggatagcgattgcgttttcaatctcgtctttcttcaataatacactcgcatagcggccgggtagtaaaatatgcttcacattcggatagagtgcacgtgctgtaaattggtgcagattagggtcaatagctgattcaacggcatatacctgcgcaccgaaagcgtccagattaccttcaacactaaaattcaggtttgttcctttctttatttgcttggcgtaacgttccggtacggaaaattcgacttttagcggagcgattttggttagtttggcaaccactgttgtcggtgaagcataagtaccgatactgacttggcgaagtccgataactccgtcgaacggagcgcgcagttcggtcagttcaatatttgcttttataatttcgatatcggcattcaaggttgccaaatctgtttttacttgttcatacgcttctttactgacagcatctcgcttcagcaatgcgtcttgacggaatacacggtcttctgccagtttcaactgtgagacgaggcgttgtagttgtgcctgcaactgtcggtcgtttactttggcaagcaactgtccttttttcaccgatgttccttcttcaaaattgatttcaacaatctttccggaagtttcaaaagataaatctacttcttcatcgggtagcaatacaccggtagttgtaaattcgtctgtcagggattgcggttttataattttggcgtttacatttaaaacttgtctcccttttttagatttgccgctcattattttgtcggcagctgttagttcgtcgttctttttgggtaattgtgaataaattcctccaccgataattccggtaccaacaaggatgatgatcccccatttagtcttcttattcatggtttagtatagtatatagcatattacattgtatcttcagtaggttagattgtttttgatagaaaaggtttaattgaataatgacaaaatagaagtaatcttccctcttttattaattagaggatgtccgactttctggggatagtttattctcagacatcctctgactgataattttttgcaataccttattaggtctaaatatgtttaatttcgtaattcaaaccatgggcagtaacctccttctttgttacatttatctccattttggtcacaccctgttttgatacatattcctgtgcccatttgattagaaagtccactatcaaagtaacgacattcatatccgtgtctaaaagtattatcttgagactgaggagttgcgttagaaactggagtgcgtctctttggtgtatttgcaggttttggggcattgaaataatacgatccatttccttcccatatcgattcgttgcatagggtacagtactcttgatatgcatagtcaaaggttattttccctcctttatatttaatgttgtcgatatccatttctttacagatgtctgtgctaccacaatgcgggcattcttctatacttttttttaatactgtgtcactgttgtattcctgtgtatatttacacttttcacacacatctttgtgatgataatgtacggttgtttcgttatatacataggcgctatgtgtaatatctccattggcttctaaatggaaatgaatgttacattttcttatagttctttcccgtccggtttcttccttatggcggttaatactgttgatggcatggcagcgtgtgcagcgcgcttctaaatttaagtaattttttaatcctctaattagcatatatcccactcccatataacatgggaaaagaatcagccacacactatgatagtgttctaagaagatgatggaaagaacatatataataagaaatgttcctgcgcgaagtgtgaagttgataatattgttagggacaatccggacaatcatcataccccaaagaattacgaacaatagtattgctgctggtattgtatataacacatacatataaattccttcgatgatagatccactgttgtcagtatcggttcctggttctattagtaatgtgccttgtggttcatatacatttagtgaaagaatatcagagtagaagaacaaaaaaccgaaaaggttcgaactctcattggaacatcggcttccggtgacaattcctttttcatctgtgagcagagtgacagagtgtcctctactgattcctgaaacatgagttagatatggaaatgtgtaagagccttcttgcttattgcataatgtatagtctccccatttggatatgatttctgtaatggggtgtttataaggatcgaaagtgtggagccaagtaccacccatataataatgataattaggattaatcattttaaggggacgctgtgtttccacgcttctacttggtatggtaaagcgatttccattcttatcttccattaacgtgttttgttcgtctgtttggcaaataaccgttatttctgtattttttgaaagtgtatatcctttctctgctaaataataggtgacatctgtcttaagttttcctttttgtttttcttgggcaacaaagtgtgtttcatcttttaagtatgataaattatctttgggtgataaactatctttggatggtgaggattctgttgaactttgtttgtcggattcttgttcttcggaatttagaatgaatccaccgacgaataatgcagacgttgtcagtacatttaagataagaaaaatgatgcagccttttttcatggttttaaaattgtttatgtagctaataaagctattgtatgtttttcagtttattattctctttgatctagtaagctgccctgtattttccttcctctttatcttccagcatatttaggtaagaagtatagcgtgattcgctgattaaatgttcctctaccgctttgcgcacagcacatcccggttcgtgacggtgtgtgcagttgccgtatttacattctgcggagactttgaatatttcgggaaagtaatgtccgatttcttcttcttccatatcgaatgtaccgaatcctttgataccgggagtatcgatgatatatccgtctccgtccacagggaacatttcggagaaagtggtagtatgcattcctttgttgtgatatgaagagatttcacccgtttttgtttctattcccggcagtatggcattgataagggtggattttcctactcccgaatgtccggagaacagtgtaatcttaccttccagtgcctttctgattgcctctactccatgaccgtttttggcggaaactttgaagcagggataaccgatatgtgtgtatagattgattagggcgtccaaatatcggaactcatcttcatcgtaggcatctattttgttaaataccaaattgacaggaacccgataggcttctgcagatgcgagaaaacggtcaataaagactgttgaagtttcgggataattgacagtaaccaccaacatacattgatcgaggttggcggcaaggatgtgagattgtttggaaagattggaagaacgacggataatgtagttttttctatcttctatttcgttgataaaggcagtgccttcttggttaaggataatctggacacggtcgcctaccgctaccgggttggtacttcggattcctttgagtcggaaattacctttgattttacattcgataaactgtccgtcatcgctctttacctgataccagctacctgtgtttttgattactaatcctttcataagttgagaattgagagttgaggattgagagctgaacgcgttgttggtatactacatagtaactttcaactctcaactctccatgctcaacttatacagtcataatttctttatctttttcagcaagcatatcatcaatttgtttgatatacttatcgtggatcttttgcagtttcgcttccgcattcttttgctcatcctctgccaatccgtcttttacagctttcttaagtgcatcaataccgtctcggcgggcgttgcgtacgctgacttttgcagtttcgccttcgcctttacactgttttgccaattgcttgcgacgttcttccgtcagagggggaataccgatacggatcacttcgccgttattttcaggcatgataccgaggtcggagtcgataatcgctttttcgatgacacggaacatactcttatcccacggtttgatggtgatactacgtgcatcgggagtagttacggctgctacattgctgataggaaccatacttccgtaagagtctacacggataccgtccaacagtcgggtactcgcttttccggcgcggatatgtgccagtgcttcttccagatacataacagccatatccattttttcttgtgcattgtcaaggcaagtctttacgtctaccatattttttgataattaaagttgctatttgattgattaagtagcaaaagtatattattttttgttcatctgcaacagcattcccatcttttttatgagtgatttgccgatgataatcaaggtcacggcggtgataatcattaaaataccaaccattaagcgaggagttagtttctcatggaacagcataacaccgaaaaataaggctgtcacaggttccaaagcacctagaatggcggttggtgtagagcctatataatggatagctaaggcggtgcagaccaatgaaatggcggttggcagaatagccaaagccaatgtatctgcccataaccaggtggatggtataacctgcagctccatacagaagttcagacggacgatgtaaaccgatagtccgaacaggatggcgtaaaatgtaagtttggtggttggcaggtttttcaatgttgagcggttcacacctactatgtatatagcatatgaaagtgaagacagcagtacgaagatgatccccaacgtggatagcggtttatcaccatctccttgatagagcaaagcaatacccgaaagtgccagcagaatagagaaaactgtaattgcggatattttttccttgaagaacacccccataataacagctaccattaccggataaacaaacaggatggttgaagcgattccagcatccatgtaattatagctcataaacaggagcaacgatgagaaagagaacagcaatcccataatgactaagggcaagacgtctgccttgtgaagcacaaaggattgacgctgcattttcatcagaatacccagtacgattgcggcaaagaaataacggtagaataaaacggtatcgacactcattccggctgcatagagcggaagtgcaaaaagaggattcataccgtagctggcagcggcaatggctccatagataaaacctttggtcttgttattcattgttcttagtcctttttttatggcgtgcaaaagtacgcagttcgtcaatgataaacaagcgtttaggcggttgatagtataatttaatctttcgtatgctaaaaactatttctaagtaaagagggaactaatcttgtttatgcataaaattaatcgtctgacaatagttaaacttgcgtctgactactgttgaactttcgtctgacagtagtcagacgaaaaagaatcaactgtcagacgattaattttattcgatcgggagattagttgtgtactaatgtacctatttcttctccgctgattaccttctttaagttgcctaccgtatccatatcaaatacaacgataggcaaattattttccttgcacatacaagtagcagttaaatccataactttcagaccacgtttcagaacttcatcataagtgatgtcgtcaaacttggttgcggtaggatctttttcgggatcagctgtatagataccgtctacacgagtccctttcagcataacgtctgcttcgatttcaattcctctcagtgaagaaccggtatctgtggtgaagaagggatttcccgttcctgcggacatgataaccacttcaccgttttccatacattcgatggctttccatttgctgtaaaattcaccgataggttccatccgtactgctgtcaatacacgggctttcacctcggtggcaacaagtgccgaactgagggcaagactgttgatgacagtagccaacattcccatttgatcgcctttcacacggtcgaaacctttactagctccgcttaggccacgaaaaatatttccgcctccgatgacaatgccgatttgtatcccttgttcgtggatttctttgatttgttccgcatattctgccaatcttttttcgtcaatgccgtattgcttttcgcccatcaggctctctccgcttaattttagtagaattcttttatactttgccatatcttttacttttaatgttttccgcaaatatagagataatttatcggatactcctcattagggaacgattacttttcgcatgatttgtctccctaaaaaggtttgcacgattcctcttagtgaaagataaacaaggaaagccaaccataaggcatgatttcccaacaaggaatggaatccgtaatatattccgaaaaagctggcggaagctaccaacatggagtaaagcatttggcgggtggcggtagcgccgataaagataccatcccaaagaaaggcggaaaaaccggctaatggaatgataagtgcccaataaaagtaggagtcggaagcagcgattactgaaatatcattggttaacaggcctagaaagcttttcccgccaactgaatataagagggtgaatagaaacgaaaggcccaatccccaataaaagagatgatgtacggtactgcggaggcctgtttgattttttgcgccgatataacgtccagccaacgcctcaccggcataagcaaagccatccatgacataggagaataaggtgaataattgcataagcaaagtgttgacggctaaaacgacttctccttgtgctgctccggcagaggtgaaaaacatagtgaccatgacaagacagagtgtacggaagaatatgtcgcggttaacttgaaagaagcgatacatggcttgtctttgtattatttctttccagacgattcgtttgtggagcgtatggtagtaacgcatatagagccaaagagccatgaagaagcctgcatattgggcaataagagtacctgcggctactcctgccacttgcatatccaataggtaaacaaaacataggctggcaacaatattaactatattctgggtaatggcgatatacattggaaaacgtgagttctgcataccgatgaaccagcctgcaaatccataaagccctaaggtggcgggagctccccaaatacagatgtagaagtaagtggttgccagttgttctacctccgatgtggtctttataaatgtaaatgccaagtgcagaatgggatactgaagcagcagcagacagaaagcgatgagtaatcctactccgacggaacgtagcaatagtcgggtgatttcgttaaggtcgtgctgtccgtaagcttgtgaagtcattccactggtccccatgcggaggaatccgaaaatccagtagatgatattgaacagcattcctcctacggcgatggccccgatataggccggagaaccgagatggcctacaatggtgacatcgatgagtcccaataatggaacggtgatattcgatatgattgatgggatggcaatctgtaatattcgtctgttttcagtgacctgttttttatctgtcattgcataaaaacacttttatcaaattgattgttcttttcgtccgcaaaggtacatcttttatttttttattgtatctttgtgtgtcacgaactaaataacaaaagtgggattatgagagccttaactatcttctttttatcattgttttcattgccactggtgctgaatgcgcagtcggtcgatgaaatgttgcagaaagtgtctgctgccattgaatcagggcagcatggacaggctgtgagctatttccgccaaacaatcggtttggatatagaccgtaccgagatgttctattggacgagcattgataagagtagtgatattagttcaaaattagctgtagaactggcttctgcttataggaagaatcggaattatgacaaggcttatctgttttacaaggaattgcttcaaaagactcctgataatgtagattatctggaggcatgtgctgagatacaagtgtgccgtgggcaggaaaaggaggctctgcgtatgtatgaaaaagttttgcagttggatgcggataatctggctgctaatatattcttaggtaattactattatctgatggctgaaaaggagaagaaacggttggatactgattttaaaaaacttgcatcgcctactaagatgcaatatgcgcgttatcgggatggattatcaaaagtcttttcgaccggttatcagaaggcccggaattcgttgagaaaagttatttcacaatttccgtcaacagaggctcaaaagacattggataagatattgagaatagaaaaagaggtgaatcgctgaaaatggttcacctctttttctataatacagttttatttgattgttcgcatgggaaattcttgtggtgccgatgtctttgttatacttctggtaaccttttttcctggaatcaacggactgtgtgccagcacataccggattctatttttttgttcattggtaaagcgattaacgtatgagtattcatagtccatgatgttgtttggggtagattgggtattatccatacagtttttcctttccataagatatggtaaatcattgaatgtgatcttgattccatttttagggatatagttgtctaaaaaatctttatattcatctctgttgtaaggaggggtatctgtacaatagtcagtgtcctcacatagattggtaattatatttcctgccgagtctttcgtttcattgaaagtatgatataaacctagatagtgtccaaattcatgggcaagggtggcaataacatctgaaggattatagatttgtccttctatattggctttcccgttaatatataatttgttgatagatatacagtgaggatatgtcagagtggagtgtgttggtaagaaattaagttgatttagtccttctaatttgtccggcttgactgtatatggaaggtaagagattcctaatatatttttgtttgtgaaccgatataacataatattgatgtattggtcggtatcccatagatattgaatattagacttgtcatccataaaattgtcacagtccaattctgcgttgtttacttttatacgctctattccagcctcagaaagtacttttccctcattgttgtgggtagcaaggatgaatttcaaatgaatatctacacttttgttattcgaattgtcataatacttattgcaagcatcaataatttcttttattcttttagttgtcacagtttggtctgaatcgctcccatcgtaaaagatgtggaagattacaggaagttgataagactcttcttggttatcagtatcgctttctttaatagatggggtaggactgttttctgagtcttcacaactaattatgaaaaataacaaagcaaataatgtagttctcatatataaaagatttttatctcaataaatattccacttccttaaacatataagcccttcggacctgtttttcgtcttctaagattaacctaccttccggctcaacacaaataattcgtgccagaaattcaccgtcaacatctttatatcggtgcattccttcttttctgaaaagtgatttttcatattggttggttatctgtgttatatctcctttttgaagtttggcataataagactgaacacggatcatgatattctttaatatcttaaagacatcatggcgttttccagtgatttgatatagtgaaacaggattgggagccggactgtagaattcttcctggttaatattgattccgattcctgcaatgctttgacagatgttccgtcccatcaaatcgttttcgattaatattccacaaatctttttctctttccaataaatatcgttcggccatttgatagaaatgtcctcagtataagtacttaactcttccttaatagccaaagatataatctgcgaaataagaaactggcagcgcgcttcccaaaaaacagggaaaagcacaaaactaaaaaggaggttcttgagcggttctgattcccaagagttcccacgttgccctcgtccggatgtttgaaagtcggcaactacggtcgtcaactcccctactttttgccgggcacaaagagtttgcaggtagttattggtcgaattcgtttcactgatatgaatcaatggaacggggaatatttcaggggagggcgtcatattttgcacgtagtttttgggggaacttcttgatgacttcatcataggaatggtcgatcaattgttttatcagtttatcatctaggtcgcggtcaaggaatacttggttccagtatttcttgttaaaatgccaagcaccttccacgccattgtaatggtcccgcaattcgatggcgtagtctggatcacatttcatcgtaatcctgtcaggcgtattgaaactaatacataaaaacatttttcccatgactctgattgtcaggaaatcatcaccgaaaggcatatcttccgtagcggcttttttgctgaggctgtattctctggctgtttcaacattcataattaatcaatttataataattttgtatcttctatgtcttgaattttaaaataaaggaggataaaacgcctctttgatatgctcgatcttgaagtttccgtcttcgcccactaccgtaatgatatcgaatcgtacaggtacatcgatttgaaatagtctcatataggtatccgtagcgcgtacggtacgttttattttagggatgtcaacagcgtcctccggttcggcaaattgagtattgctgcgggtctttacctccactacaattaattcctgcttttgggtagccacaatatccagttcaaaatgtccttttctccagttccggtcacgaataatgtaaccttgttgctccagataggttactgcggcattttctccggcttttcctaattcattatgtttagccatctttttttgcaaatttactgcttttattctttgtttttacagaagtaaaagtaattttgcagaagatatgagaaaaagaagtaaaaagtgcctgaaaatgcacgtcgagtgtacgaaacgtgaacgacgtatgagcattttgttgagcgacgaagaacagctgattgttgatcgttatcttgagaaatacaagataaccaataagtcacgctggcttcgtgaaacgattctcatgtttatccataagaatatggaagaagattatcccaccctttttggtgagcacgatatgagacgataggggataatcttaaaaaaatgtagattaaaaactagagggggatgctggacgatacttactttatgaaacaggctttgatagaagccggtaaagctgccgaacggggtgaagtgcctgtaggggcggtcgttgtttgtaaagaacggattattgcacgtgcccacaatctcacagaaacattgaatgacgtaacggctcatgccgagatgcaggccattactgctgccgccaatgtccttggtggtaagtatctgaatgaatgtacattgtatgtcacggttgaaccttgcgtgatgtgtgcgggagccattgcctgggcacaaacagggaaactcgtattcggtgccgaagatgaaaaacgtggctatcagaaatatgccgtttcggcgctgcatcccaaaacagtggttgtcaaaggactgctggcagacgaatgtgccgcccttatgaaaaacttttttgcggcaaaacgtagatagcgattgatggagtggtgattaataaccgagctgtgtagagtttatcgttattctttaatttcctcgaagtctacatattctccttcatcctgggtgaatatctttttatgcttttttcttggaacgtcgtcggagaatatttcctcttcatgatccgtcggacgatgtgttccctgactgtagctttgttggtccgcgctacgtccggattcgttttgtctcggtcgtgatgaagacgaaaaacggtggcctattccgaagatggctttgagtatgagtccgacaactgaaagaccaaatacgataatggtgatgataaagagaagtataaataaaagtatatgcattgggctatgatttttatattgtaactctgataaaactcatagtacaacaaatgtgccaagagattgtttatttactttttcttgtaaaaagtgaaagtaaaatataccatacaacgatggctgcaaaactgctgattccaagaaatacaaggaaaggaatgcatacaatcaaaaatgtaaaactgattttgttgtcattccatgacagattcttgaattttaaagagaacatggggatttctgctaccaataaccatgaaaacagacaaacaagtataaaaagatagacaggatgacagctttcggaaatcagtatgtcatgtgcgcctgctactaaggaagcccaaaacagagcattggcaggaacaggaagaccgatgaaagaagtggtctgtcgggtatcgttattgaactttgccagccgcaaagcagagaatacagagattaagaatgcagcgtacggcaggtaaggagcgataaattccatgcttgccggatagtacatctctttgaacagagagaatacaatcgctgagggagcaaaaccgaagctgacatcatccgccaatgaatccaaatcttttccaatgatggagtgtgcattaagcgcacgtgccaacattccgtcgaaaaaatcgaatacggagcttagaataatgaatagtaatgctagttcataacgggcttcaaaagccatgacacaagcaatacaaccggagaaaaggttcaggcaggttacggtattcggaatattttttttaataacgttcgtcattgtgacaggattatttgagtttggcgataactgtttggttaccggttgttaattgtcccatagtgacacagacttccgtgccgatgggtaaatatacgtccacgcgggaaccgaacttgatgaatcccatatgttcgtcaatataacattcttcgcctacctctgcataggtgacgatacggcgtgccacagctccggcgatttggcgggtaagcacttccactccttccggagtttcgattaccaccgtagaacgctcgttttccgtactggctttcggcagccaggctttcatgaagtttccattgtgatgtgccacctttttaatagtaccgtccaccggataccaattggcatgtacgttgacaatactcataaagatggagaccattaatctccggtcatgaaaatactcgttttcatcaacctcttcgataacaacgatttttccgtcggcaggtgctacgactattttttcagtgtcctgtccgaagagacggatcggacaacgaaagaaattcaccatcaacagataaactgttatacttgctactgctaccacatagaatggtatcttacaatcgattccccaataaagagcgacattaatcaatagtagtagcaagaagctagcccataatatatgtgttccttcgcggtgaatacgtattttctttaatttctttagtcggcccatgaatgctgtttaatgatattgcctgcaaaaatatacttaatttaaaaaatcggcaagtaattaggcatagaaatgtgaatgttgataactttttgaggattatttttgtttatctctcgggagatagtaattttatgccttcaaattaactacttatcattatgcaggatttcgttcatttacatgtccatacccaatattctcttttggacggtcaggctagcgtggctcgtctggtcgacaaagcgatgaagaatggaatgaagggtattgccgtgaccgatcatggaaatatgttcggtattaaagaatttacgaactacgttaataaaaagaatagcggtcccaaaggagaggtcaaagacctgaaaaaacgaattgcgggtatagaagccggaaccatagagtgtgaggacaaagaagctgagattgccgattgtaaagccaaaattgtagaagcggaaagcaaactgttcaaacccatcatcggttgtgagatgtatgtggcacgccgtacaatggatttaagagaaggtaaactcgaccagagcggttaccacctgattgtattggctaaaaatgaaaagggataccataaccttattaaattagtatcgcacgcatggacgcgcggatactatatgcgtccgcgtaccgaccgcagcgaattggaaaagtatcatgaaggtctgattgtctgttcggcttgcctcggtggagagataccgaaacggattaccaatgatcagtttgcggaagcggaggaagccatacagtggtataagaacttattcggagatgacttttatctggagatgcaacgccataaagcgaccgttccccgtgccaatcacgagtgttatccaatgcaggtaaaagtgaataaatacctgatggagtatgcccaaaagtacaacataaaattgatttgtacgaacgacgttcattttgtggacgaggaaaatgcggaagcgcacgaccgtctgatctgtttgagtaccggcaaggatttggatgaccctacccgtatgctttataccaaacaagagtggatgaaaacacgtgaagaaatgaatgaactctttgcggacgtacccgaagctttgagcaatacattggaaattctcgataaagtagaatattattccatcgatcatgcccctattatgcctactttcgctattcctgaggactttggaacagaagaagaatacagagcgaaatttacggagaaagacttgttcgatgagtttacgcaagatgagcatggcaatgtggtgttgagtgaagaggatgcgaaggctaaaataaaacgtctgggtggttatgataaactctatcgtatcaagctcgaaggagactatctggctaagttggctttcgatggtgcgaaacggatatatggcgagcctttgtcggaagaagtgaaggaacgcatgaattttgagctatatatcatgaagactatgggtttccccggatacttcttgattgtgcaagactttatcaatgctgcccgcaaggagttgggtgtatccgtaggtccgggacgtggatcggcggccggttcggctgtggcgtactgtctgggtattacgaaaatcgaccctatccaatatgatttgctgtttgaacgttttctgaatccggaccgtatctctttgcctgatattgatgtggactttgatgatgacggtcgtggtgaggtacttcgctgggtgacgaataaatatggtcaggaaaaggtggcgcacatcattacctatggtacgatggctacaaagttggctatcaaggacgttgcccgtgtgcagaaacttcctctttcggaatccgaccgcttggctaaactggtgccggataaaattccggataagaaactgaacttgccgaatgcgattgcatacgtgcccgaattacaagctgccgaagcttcatcggatccgttggtgcgcgatacgctgaaatatgccaaaatgcttgaaggtaatgtacgtggtacgggtgtgcatgcttgcggtacgattatctgccgtgatgatattaccgattgggtgcctgtcagcactgccgatgataaagaaacgggtgagaaaatgcttgtcacccagtatgaaggttcggtgattgaagataccggactgattaagatggactttcttggcttgaagacattgtctatcattaaagaagccgttgaaaatatccgtctgagccgtgccattgaagtggatgtggatcagattgatattaacgatccggctacttataaattatacagtgacggtcgtacgatcggtacattccagtttgaatctgccggtatgcagaagtatttgcgtgagttgcagccttctacattcgaagatttgattgccatgaacgctctctaccgtccgggaccgatggattatatccccgattttatcgatcgtaaacatggacgtaagccgattgagtatgatattccggtaatggaaaagtacttgaaggatacatacgggattacggtttatcaggaacaggtgatgcttttgtcacgtttgttggcggactttacacgcggtgagtccgatgctcttcgtaaggcaatgggtaagaagctgcgtgacaagctggatcacatgaagcctaaatttatcgagggtggacgtaagaacggacacgacccgaaagttctcgaaaagatttggacggactgggaaaagtttgcgtcgtatgctttcaacaagtctcatgctacttgttattcatgggtggcttatcagactgcctatctgaaagcgaattatccttccgaatatatggcggctgtaatgagccgaagtttgtcgaacattacggatatcacgaagctgatggatgaatgtaaggcgatgggtattcagaccttgggaccggatgtcaatgagagtaacttgaagtttactgtaaatcgtgacggtaatatccgtttcgggcttggagccgtaaaaggagtaggcgaggctgccgtgcagagtatcatggaggaacgtgaaaagaacggtccttttaccggaattttcgactttgtgcaacgtgtcaatctgaatgcctgcaataagaagaacatggaatgcctcgcgttggccggtggctttgacagttttccggaactgaaacgtgaacagtactttgctgtcaactctaaaggagaagttttcctggaaactttgatgcgttatggcaaccgttatcaggctgataaagctgctgcagtcaattctctgtttggtggcgaaaacgtaattgatgtggcaactcctgagattcctcagggagtagagcgttggagtgatctcgaccgtttgaaccgtgagcgtgatttggttggtatctacctttccgctcatccgttggatgaattctccattgtattggaacacgtctgtaacacacgtatggcagatttggaagataaagcagcccttgctggtcgcgaaataacgatgggaggtattgtgaccagtgtccgtcgtggaatcagcaagaacggaaatccttatggtatcgccaagatagaagattattccggctctaccgagattccattctggggaaatgactgggtgacttatcaaggatacctcaatgagggtacttttttgtttatcaaagctcgttgtcaacccaagcaatggcggcaggatgaactggaagtgaagattacttctatggaactgctgccggatgtaaaagaagagttggtgcagaagataaccattattatcccgttgtccgtgttgaactccgctttaatcacagaacttgcaacattgacaaaagaacatccgggaaatacggaactctattttagggtgacggatgatattgatgtaaaccgtatggtggtcgacttaatttcccgtccggtcaagctttcggtgggccgtgaattaataacctatttaaaagaccgtccggaattggggttccgtataaattgattatatttgtggcggtaatagcaagtgaaatactatttaataattaatacttaatatttaaaaaaatggctttagaaattacagacagcaactataaggagatccttgcagaaggaaaaccggttgtggtagatttttgggctccttggtgtggcccttgcaaaatggtagctcctattattgaagaattggcggcagagtttgaaggacaggtaatcatcggcaagtgtgatgtggatgaaaatagcgatttgcctgctgaatatggtatccgtaatatccctaccgtattgtttttcaagaatggtgagattgtagacaagcaagtaggcgctgtcggcaaacctgtatttgtagagaaagtaaagaagctgttataagcagtctacttaatatctatcacttaatacttaaatgatcatgggactggaagaagattttttattagcagatgccgatgacgaaaagaccatcgagtttatcaaaaactatctgcctcaagaactgaaggagaaattctcggatgacgagttgtattatttcctcgatttgattgacgagtattactctgaaagtggaatccttgatgctcagcccgatgcggatggatatgttgatattgatctggaagaggttgtggcttacattgtgaaagaagccaaaaaggatgaaatgggagaatacgatccggaagaagttctctttgtggttcaaggagaaatggaatacggaaattctctgggacaggtggactaaacggtgtccggtctcactgtgagataaacccctcttttaattgtcacttgtcacttttctggcttaatctattgatagccaggtgaaatttggtgacaatagcgggtgataatagaagaaaacgtattttctattatcaccttaattattactgaacaactggtcattctgctgattatcagcctttaagtgtattatccgattcccggttccccgtgtcttaagaatgcccttttcgaccataaggttgagctcacgcagtgcttttctttcaataacccgttatttgactgtattctctgcgggtgatgaagaagtttttcttcaaaaaggtatccaatcgtgcgaaacgtgtctcttctaggtatacgaacaaaggaactgtatatctggttgttaagctgtaaatatgtagggtcatcggacaaacttcctatatttcttctaacgcataatattgataatctcttaataccgtctggagaaatttttcctgattaccatcctgcggagtgatggaaagaagtgactgtacctttttggcaagcgctgagatgcgccgtatgcggtctttttctccggactctagtgtacgggtaatcacatttacctgttccaatgataagtcggcggattgagggtagaccggacggtaattcttcatcagatagtcgaattcgtcaagactgacgtgtattttgcgatagttcttttctttaatcaccattgttccggcagcgagatcacctagacgctgattattcttggtcagtaggatgacaaagatgcctaaaccgcttgtcaatggtccgtcaactatgaaaaggagccaccgtagcaggtaagaaccaatgctgggagtagaaccgtccaactttaccacacggatattcatcaatctttttccgaaactctgtccgtgattgaacatttcgcagagaaaggagtagccgagtatgggcagataaacgataaacagaaaaaagaacaggttgaatcccgatggcaagtgtaactttgcaataagggtaattgtagaatagagataaagcccgatcagaaaataatcaatgatcaaagcgatcagacgttcaccgatactggcgggtgtttggctgatacgaacaaactgtccggttattatcgtggattctgccatttatggttaaacatttttaggattccgttgcaaatatattataaatctcttacttttgcttccggtttcggacaaaacttatctggaatttactgaaaagcatgaaagaggttacgtttattcgtcggaacattgaaaaatggaaagagacagagaagattgtggagcaggctgtcggcttgtctcccgaccgacttgcggatgcgtatacagacctgactgctgacctggcattcgcccagacacatttcccgacttcccgcatcactatttatctgaataatctggcttcggcgttgcataatgaaatctatcggaataaacgcgagaagtggacacggattatcaccttttggacgcaggaagtgccgcaaacaatgtatgatgcacatcgcgagttactggtttcttttattattttcgttgccagcgcactgattggagtattgtctgctgcgaacgatccggatttcgtccgcttgattctaggaaacggctatgtggacatgacattggacaatatagccaatggtgagccgatggcggtttataacggttcggatgaagttccgatgtttctggggattacgctcaacaatgttatggtatctttcaactgttttgcaatgggactgctgaccagtttcggtacaggctatatgcttctctccaatgggattatgataggagcctttcagactttcttttatcagcacggtttgctttgggagtctacccttgccgtctggctgcatggtacgctcgaaatctgggcaattattgtggcaggtgccgccgggctggctttaggtaacggatggctgtttcccgggacttattcgaggattgaatccttccgtcggggagcaaagcgcgggctgaaaatagttataggcactgtccccgtatttataatggcaggatttatagaagggtttataacccgtcatacggaacttccggatatgttgaggcttggtgtaattctcacttcactggcatttattattttctactatatttatttaccaaataagaaaaaacatggaatcacagaaacctaagattgcgatgtatgtgaaacgtcctttcggtgagaagctgaatgcttcttttgattttataaaggaaaattggaagcagttgctgaagtatgtaacgtatctgatacttccggtctgtttgcttcaagcggcaaattttagcgggttgatgggcggtatgacggatcttaccgctatgcaggcggcaggtggaatgggagatgatccgttatccgttttcggaccttcgttcgcattcaattatgcaggacttgtctttttttcatttttgggagccttgctgttgacctctttaatttatgccatgatccggttatacattgaacgggaagaacgtctgaatggaattctctttaacgatataaaaccgttattacttcgtaatatcaaaagattattcattataggggggttctgtagctttttgcttctgcttgccgttatcattatagtgctgttggcagtgttgaccccatttacgttactgctcactcttccgttattgtttgcatttgccatacctcttgccttgatggctccgatttatttgtttgaggagatttcgttaatggaggcattcaggaagaccttccggttgggatttgccacttggggaggggtttttctgattcttattgtgatgggacttattgctagcgtgttgcagggaatcgtttccataccgtggtatataatctatatcgtgaaaatggtatttaccatgagtgacggtggtgaagcagggtcttctgtcggactgaactttgcacaatatctgttctctgtcctgatgttgtatggctcttacttgtcagccatatttacggttgtcggtctggtctatcagtacggtcacgcatctgaggtggtggacagcataacggtggaaagtgacatagataactttgataaactctaacaccggacgcaggagaaatgaatctgacttccccgactgatacgttggtctgtgatgcggcgcagcttgcccgatggcaatctgatccggcgtataactataaccgtgagttgattgctccggagattaatctcttcgaatggatcaatagacagtttggggaatttctgcgtgaaatattcggcagccgttttgctgatgagtattcggaacttattctggtttgtatcgctgtcgttatcctgcttttggttagttggtttgtctataagaaacgtcccgaactgttcatgcgctccggtaagagaacattgccttatacggtggaagaagatacgatttacggagtcgactttccggaagggattaacgaggctctttctcaaaggaactaccgggaggctgtgcggttgctttatttgcagacattgaagcagttgagtgatgcaggtcgtatagaatggcaaccttataaaactcctacgcaatatctgtatgaagtgcgactccctgctttccggcaactgacaaaccattttttgcaggtgcgctatggaaattttgaagcgacggaagaacttttccgtacaatgcgggctttacaggaagaaatagaggaaggaggcgtctcgtgaaaggaagccgttggtttattatctttatcgtagtctttttgttggtcatgtttgcggtagaatatcatttgccgaagaaatttgtgtggaaaccgactttcggtcattacgacaaacagcctttcggttgtgaggtgttcgatagcctgttgtcgtcttccttgccgcatggatatgcgctgtcgaagaaaagtttctatcagttggaacaagaggatacggtagggcagtgtaaaggtatattggccatagctgatgacttgatattgtcgagtgtggatgtgaaggctttgctgcggatggctgatcggggcaataaaataatgttagtgagtaccttatttggtacaaatttggaagatacgttggatttcagaacttactattcttatttcagtccgatggctttaaagaaatatgccgcttctctgttggcaaaagacagtatatgctgggtgggagattctacagtgtattcacgccggactttttatttttatcctcaattctgctcgtcctacttttggatggattcgctccggagtgaggtcctggcacaaagggtgattgactcgaacgagtttcgctatgagaccgaagcggattctttggtgacggatagtctttcgtgtatacctgtcgcgatgtcctaccggcatggtaaaggagagattattttagtttccactcctttgctttttacaaactacgggatgttggatggaggaaatggagcctatctcttccgtttgctgtcgcacatgggagatcttcctgttcttcgcacggaaggatatatgaaagaaacggtacaagtgcagaagtcccctttccgctatttcctttcgcagccaccgcttcgctgggctttgtatctgacgatgattgccattcttctctttatgatatttacggcaaagaggcggcagcgggttatccctgtcatacgtgaaccggcaaatagatctctcgaatttaccgaactgataggtacactgtattttcaaaagaaggaccatgacgacttggtgcggaagaagtttacttattttgccgaagagttgagaagggagattcaggtagacattgaagaggtagcggatgatgaacgctcttttcaccggattgcccggaaaacggggatggaggttgaagagattgcgaagtttattcgtgaagtgcggccggtgatttacggaggacgcaggattaatgcggagcaaatgaaagtgcttattgataaaatgaatgaaataatcaatcatatctaaagaagaaatttatggaagagaatacagaacaacggttagatttaactcttttttccgagaggatacaggagttgaaggagcggattgcgtccgtcgttgtaggacaggagcagactgtcgatttggtgttgacggctgttctggcgaatggacacgtattgatagaaggtgttccgggcgttgcaaagacactattggctcgtttgactgcccgtctgattgatgctgacttcagtcgtatccagtttactccggatttaatgccgagtgatgtgctgggtacaactgtgtttaatatgaaaaccaatggttttgactttcatcaggggccgatttttgcagatatcgtattggtcgatgaaatcaaccgtgctcctgcgaagacacaggctgccttgtttgaagtgatggaagaacgccaggtcagtatcgacgggaccactcaccggatgggggaactttatacgattctggctactcagaacccggtggagcaggaggggacatacaaacttcccgaagctcagctcgaccgttttctgatgaagataacgatggattatccttcgttggaagaggaagtgaatattctggaacgccaccatacgaatgcggcattggtaaaactggaagatgtgccccccgtacttactaaagaagaacttctttctcttcgtgccttgatgagccgggtgtttgtagaccgtacgctgcttcaatatatcgcgttgattgtgcagcagactcgtactagcaaggcagtgtatctaggagcttctccacgtgcttccgtagcgatgttgcaatcttcaaaggcctatgctcttttgcaaggacgggattttgtgacaccggaggatatcaagttcgttgctccgtatgtgcttcagcatcgcctgatcctgactgcggaagctgaaatggaaggttattctccggtgaaagtgacacagcgtttgattgataaagtggaagtcccgaaatagatgtttttaactcgtcgcttctatattgccctgatcgtagttatcctgttgctgggtagcggatacgttcttgctccgttctttgtcatcgggcagtggatactttttttcttgtttctggtggtatcggcagatgtgtattctctttatcgtattcggggaatacaggctttccgtcagtgtgccgaccgcttctccaatggtgatgagaatgaggtgagtattcgtgtggaaagcagctatacgtatcctgtttctttagaggttattgatgagattcctatcgtttttcagaaacgtgatgttgactttcgtacgaagttacaggcgaatgaaggaaagacgataacttatcgtctgcgtcctacccgtcgcggtgtttattcgtttgggtatgtcagagtttttgtgaccggaaggattgggctggtttcccgtcgttatacctgtgcggaacctttggatatcaaggtgtatccgtcttatctgatgcttcatcaatatgaattgttggcgatgagcgataatctgaccgagctgggaataaagcgtattcgcagggtgggacatcatacggagtttgaacaaatcaaagagtatgtaaagggagacgattatcgtacgattaactggaaagcgagtgcacgcaggcatgagcttatggtgaatgtatatcaggatgaacgttcgcagcagatttacaatgtgatagataaaggacgggtgatgcagcaggcttttcgtgggatgactttgttggattatgcgattaatgcttcgctggtgctttcgtatgttgccatgcggaaagaagacaaagccggattggtgacctttgatgaacacttcgatacttttgtccctgcttccaggcagccgggatatatgcaaacgttgttggagaatctgtatagtcagcagactactttcggagagacggatttctcggctctttgtgtgcatctgaacaaacatgttggtaaacggagcttgttagtgctctataccaacttttcgagtataggcagcatgaatcgccagttgtcttatctgaaacagctgaatcaccgtcaccgtttgctcgtggtctttttcgaggatgccgatctgaaggaatacattgcacaaccggcaaaagatacggaaggctattatcgccatgtgattgcagagaagtttgcttacgagaaacggctcatcgtatctactttgaagcagcacgggatctattctttgttgaccacaccggaaaatctttcaattgatgtgattaataaatatttggagatgaaagcacggcaactattgtaatataaatcaataatggtctgacttttctttatttcttataaagcttataatcccatgacttttcgtgtttctacaaaaaagaagatagccatgcctataatgataatccctaatatcccatagaagagtcgtgcccggttacgtcctacatttctgacaatggtttgcgcattacgtgttgtaaagaaccagtcccagttaagcaatgacgccagcagggagacagttcctgccagcgcaaagattccttgtacgatatattgtccggtcatagtttaatcactctacttccgtcttccagttcttcaatcgttacttttacggcatcacccggcagtaattcttccaccagttccggccattcgataaagcagagagcgccactgtagaaataatcttcgtatcccatatcgtacacttcacttagtttcttgatacggtaaaaatcgaagtgataaattaactctccggtttcgtccgaacggtattcgttgacaatagcaaaagtcggagaactgatgacatcggctacacccaattcttcgcagagtgcttttacaaatgtggttttaccggcacccatctttccgtataaagcaaatacagtgttgtcgcccatggcagcgatgaattcctgggctgcttcatggatactttccagtgattgaattttgatttccatatactatatttattatgatgactttttcctgcaacaactctttccgattttgcagacagcataaatcaggatagagaagaatatgatggaagctcccgaggggactttccagtgataagaaataaataatccacccaggcagcccaagaaaccgatgccaattgataaccagatgattttcttgaaactataagtgaagaggttagccgtcatttgtggaatggtgagaagggatatggctaacacaatacctaccatccgcaggcaggctacaatagtcaatgcgatgaacatcattaacacgtattcgaatatctctaccggaatcttctgcgaacgtgcaaattcacggtcaaaggcaatatatacgatagggcggataaacagataaaagaatccggttagtatgagtgccaatatgccgagcatccataagtcaatttgattgatggtcaggatattcccgaaaagataagctgataagtcgggtgcaaatccaggtgacaaaaagctgaacatgataccgagtgccatccccaacgtccagaacactgcaatggcagagtcctcacgcatatctttccgtctgctaagccactccacaccgaaggctgataaaacagagaatacagccgctgagagtatcggggaaattccggcaaacaatcctaacccaataccgccaaaagaagcatgagtgattcctccactgataaataccagacggcgggtaacgatgtatgtaccgataatcccacaggcaatgcttgccagcagactacccaataaggcgtgttgaaagaatgtatattgtagtaaatccaagtaaattaaaaattaaagattaaaaattaaagaccgtaatcagatcacagcaacgaactatcgtctctcaactgtcaactctcaactgtttccgtttcttctttctccgataatcagaaagacctcgtctttgaggtcatccggcagttcgatgccacggagttgaagactacgtacccatccggctacttctatatccaatgttgtatacagtacatcccgaaacatatctgtctctttttccgtatatgcatttccaggtctgccgatgaattggtccagctcttcatcatcgtagtattctatctttttactgacagcggccaacaaactatccctttcacatacttcatgttgtccgcagcattccgcatctacttctttcacttccggcatacgatccagttcgcctttttctattttcttttctagtcttttgttgcggatgattccggctatcagcgcgataacacccagcagtaccagacttataatgagtatccacataccaatataacaattacgaatcaaatttgtgcaaagttacttataaatttcattctattgagtatggcatctatttcttttcttacttttgtatgttgctaacttaaatataacatgaaaagacagagtataattcgttcggagtatgtgtgtgattatcttattcattactcttgctgcctgtaaagatacagacaacagagtgtttggagatgattttgattttccagcgttgacagatgaaaacacgattcgctttacggtaaatgttgtaggagattggcggcaattggacattgtggcaagtgggggacgaatggtgatagattggggaaacggtcgtatacagaaaatagaagacccttcttcaatgactggcggagtggtatatagatatggaaataagggatcatacgaagtgaagattttgggcagaagagctgcagcttatcgatataagtggtttgcttcttcctttgagtaatctttatttgggaaatatgccgcgaatgaaatctctggctttgaattgcatttctggtacccgaaaattggacttgaataccttttgtcccaacgtggaaagtattaatatcggtagtctcgcagatttggagcgtctggagattgggaactgctcccgattgcgatctatacaaatttattctaatccaaaataaacttcaatagagtttggcagtcatccggaaacggaaagtttatactgttcttataatggcctttcttccctttcccttaaaagcttaccggcattgcgcaatattgatttaagttctaatgaacgattgtcacgtctggaattgaacgaggagacttcaatttctgcgatattgatacaagaatgtgctttccaatcaattactgatatattgaaatgttgttcttctttaagggaattaagttgttcatataataaattgaccgaacttgatctatccggttgctctaatatcagtgagttgcgttgtgaacataatcagctaactcgtttaatggtaccgcaaggaagtttgttagaacatctttattgtcactcgaatcaattgggtgaggatgccctgaatacgctgtttgattccttggggcaagtggtgaaccctgccatttattatccgacttctctccgccaatatcggatttcttttaatgataatccgggagcagatgattgtaatagaagtatcttgaatgataagaactggatagttgaaaataagtaaagtattgacgacaaaccaccagagccttttttctctatatgtggaggatggcaaatgagaagtccttttaatgaagcggataaaatacaatcctgataattaacgggaaaagtcaggattgtatttcttattttttgagtattctttttaaatagtcgatagttggtaaattcacagtctcaaaacttcctttataaaatacagcaaaattgttaaaaacacacggtaactcttttgctttctgtagcgtatctacttgaataaaagaaacagggacatcatttgtttcacaatattgtttgatcatttcaatgtatttatagatataggggcattgcatatcataataaatcgtcagttcctcactttctattttcagattcttggcatttggcgcgaacttcggtactgttccgtcaaaagaaagagcaagcaattcatatccgttatcggtagtggcaaccacttcaaaaccaaatttctttgcaaatgattggtcggaaagccagctcttctgtttttttgccccgagcatacaaatgccggatctacctttttctttggcatcggctatacagtactccatcaacgaacttccatatccgtttcctctgggactacctaaaacccataaacaatagaggtaataatagttatctcccattatcggaacccaagctttttcgagaggagcatattcaataaagactgtagcttttgcatttaactttctaaaaacatgaccttccttcagtcggtcggaaagccattgctgttttgcttcaatgcccggatgggatttcttgctacggataatgcagcataaatgctcataagaaagattttctgctgttaagtttatgaaatcagtattcatatatgctctcgtttttatttagatagtatcgatcagccagtggggtaattataatcctttattagcctgctgacagactataatgtccgaaggttacccttcgtttatcacctgaaatccggcctgcttcaaatccccccaatatccgggatatgatttggtgaccacctgcggatcggcaataagcaaattaggatgacagataactgccggagcaaatgccattgccatccgatggtcttcataggtttcaatcaccggagtttcttccggttcacatcgttcgccattccacattaatatactgtcattttcttcctcgatcacatatcccagctttttaagctcggctcgcagagcggcaatacggtcagtctcttttattttcaggctttgtaatccggtgaaacggaaagggatattcagcaaggcacaagtaacgacaaacgtctgtgccaagtccggaatatcgacaaagtcctcttccagcctttccggcgctttgcctgtttttttcagtttcacaccttgcgatgtaaattcggtagttatacctaagcgtgagaaaacttctgctccccggctatctccctgataactgttatgaaacaaccccaataattcaatttctgctttgggagataaggcggcaatctgataccaataggaagctgcgctccagtcactttccactttgaaaggaatgctctgatagagttgtggagcaacggaaatgctattgggagaagtccatgcggctttggctccaaagtcctgcatcagttgcaatgtaagattgatataaggacgggaaattatctccccgcttaaatgcaaagtcaaaccgtctttgagtgccggacctatcatcaatagagctgatatatattgggaacttacatttcctttcaaggttatttcatttcctttcaactctgcacctttgatacataagggaggatatccttcattgtggacatactctatttcagctcctaattcccggagcgcattgactaatatctgtatcggacgttgctgcatacgggctgttcctgtgattgtccgttcccccggggtcacacttaaataggcggtaaggaaacgcatagcagtgcccgcagccatgatgtcaatcgtctctttcccttcggtgagagcttttatcatcacctgtgtatcgtcgcaatcggacaggttttcaggaggataaatacctttgcccagcgcattgatgattaatgcacgattactgatacttttagaagccggcaactggatagttgctgttactactgaaggagggatgagtttatagagcatcatttctattttctttggtttgagatgacaaaaatagatataaattggtatatatgcagctataaagtcagaaaaacaatagaaaatttagaatggggaaattgcaatcgtatttgaagtagaggataaaatttcaagaaattacaattgtatttaaaataaatgctatattggtgacgaattacaattatatttaaaaagggagcaaatgaaaataccaaatatacgtttactcaaccaacagttattaagtcctcttttctctcaacccaaggaacttgtgtcctggatgggagccatgcaggcacagaattattccatggtgaaatgggcagtaggaatgcgtttgaagtcagcaacgattcaaactgtggaaaaagcactgcgtgatggtgaaatcctgcggactcatgtaatgcgtccgacatggcatctcgtagcagcagaagatattcgatggatgttgaaactttccgccgggcgtattatatctgctaatgagtcttatgcgaaagggcatgacttggaaatttctgaagagctctatacgaaaagtcataatctgttggagaaaattctttgtgggaagaaaagcctgacgaggcaggagattgccgagcattttaaccgttcggggattgtagcggataatcatcgtatgacccgctttatggctcgtgcggagcaggtggggattgtatgtagtggggaagataaaggaagtaaatgtacgtatgcgcttttggaagagcgtgttccaccggtgccggaattgaccaaagatgaatctttggctcgtttggctagaagctattttcgtagtcatgctcctgctgttttgcaagattttgtctggtggtcggggctgcctattacagatgcacgtcaagctatttatttgattgattcggaattaacggcagaagaatggaatggacaaacatggtatattcatgaagattgccggactcgtggaaaagttaccggcagtttgcatcttcttccttcttatgatgaatatttgcttggttataaagaccggacagacgttttacctaaagagcattactcgaaagcatttaccaataatggtctgttttatccgattgttcttcatgaaggacaagtgataggaaactgggataagtctgttaaaaagagaggctcattgatagaacattcatggttccggttggatgattgtgtcgatgaaagtgtgttggatcatgagaaagataagtatatacggttttggcgataatatatgagaaaacgtatattttatcgttgtataattccatatatgcaggatatatttaggcatgagttgaaaatgagaaggatttgctgttttcgaatttagaaaagaaataaatcgattgcgttttgggacaatttgttttagtctgtattttttatagaatagatgtatagaacttacctttgttttgtctcaaattgatatgtggagtgttggctgtttcaggtgtaggttagctctgggatagcacttaaaataaagttttatatgctccttttaaaggaataaagtgtttctcaccgatcaatgagtcgttcctttaaaaggaactggttattccttttaaagaaacgattgtcaataagtttattatagtgtatcttttgactgtttttatgtaaaaaactcctctgaaactgtatattcttgcattattttatacaacagaactgctggaagaggaaatccgtgtgatgctatttatactcatcatattaaaaatagaacatttaaagtaagatatactaccatatttatagtataaagagctttctctctatttaaataaatagcatcaggactgatttttatttgttcatttgcctttttgcccattccagtcttcgttgatcggctaatggagtcactttaaattcttcgaatgtagcggtgaaccctttcccgtccggacaagctcccattaatcctaccatgacaggacaattatcttgcaaccaacacgtgcgcatcataatatattctttatcatcacgtgagaaaaatatttctactgcatccaggcgacggactgcttttatccatatagagcggggagcatccggcaattgtactacactccagtcgctagtccgatgcgtaactacggcacttacattctgtttgccatcgacgtattccacacctgcttttatccagttttcatggtcgatgcgcagcattaatcccatttggtcaaaggtggtgacatagttgccggttatctttactttggcttcaaattctccaccataagtcgcataatagaaaggtccgtcgtccactgtgaacccataatgagaaatcctccaaaagtctgtttttgcaggaacatccatcactaaggttttgccaccttttatttcccactgctgaggctcgttcagccagttcatcttattcaaactttgtgccatagaagaagttgctactgccataaaggctattgacatgattttgatttttaaatgtttcatgatcgtttcttatttgattatctttatctttgtggtgcaaagataggtcatacctccgtgtgcaacaatactgaataataaccattttataagatggacgtattacaaaaggaaatagatgaagtttatgcgacacaactgatagccgatgaaatattggacaatggagttgtagagcaacatcaacgctttattcattcattgacggagattaatggtggatgtgctgttatttcagatctttcgaataggaaaagttacattgccgttcatccttgggcgcattttctagggttaactcccgaagaagctgctttaagtgtgattgattctatggatgaagattgtatttatcggcgtattcatcctgaagacttggtagaaaagcggttattggagtatcagttttttcagaagaccttttcgatgtcttccgaagaacggttgaagtaccggggaagatgcagaatacgtatgatgaatgagaaaggagtctatcagtatattgataatttagtgcagattatggaaaatactccttccggaagtgtatggttgattttttgtctttataccttgtctgcagatcaacgaacggagcaggggatatatcccactattacccatatggaacgtggagaggtcgaaacgctctttttttcggaagaacatcgcaatatcttatccgagcgcgaaaaagaaatacttcgctgtatacgtaaaggactatctagtaaagaaattgcagctgccctttatattagtgtgaatacagtcaatcgacaccgccagaatattttggagaaactctctgtcggtaattcgatagaagcgtgtcgggctgctgaattgatgaaactgttggatttgtaatccaataagatggcattgttcactgatttctttcttcagatttaaagcttatctgaagaaagaacagaacttatttaaaacaaaagtagcaactcatcaaatcttttcacctgtttcagatggtcatgtgtgaatgtgtctactacttcgtgtttccacatcacttcaaaaggaatatgtataccatatcctcccagcgatagaacaggttgaatgtccgatttcagagaattgccaatcatgacaaattcggaaggagcaatctgtaagatattcaacattcgttgatattctttctctgttttatcggacatcacttcaatgtgatcgaaataagaggctaatccggaacgttccagcttattctcctgatcgagtaagtctcctttagtggcaactactaatttgtatttacctttctctttcaatactttaagcgtttcttttactcccggcaatagttcaataggcattttcagtaatgatttgcctaattcaataatatgttggatgtctgtacctgaaattttttgtccactcacatgcaaagctgtctctaccatagaaatggtgaaagctttggctccatagccgagatatttcagattattcatttctgtttgaaataaagcggctgaaatatcttcagaagtgccataaggctttaataggtctgtatattgtttctctatttcctggaaaaaaggttcattgctccacaaggtatcgtctgcatcaaaagcaatgactttaataagttctttcatcggttttcgtcgttaatggtgaattttagattatatgtttggtatttcgtcgggtgcaaagttacaataaaaagaggaataaaggcagacggtttgtttttagaaccgaatctccatttaatttcatagaaatctctatctttgttactcgtttttttgagtttgaattttaattggatatacaataatgaaaataggagataaagtacgctttcttagtgaggtaggcggtggaatcgtaactggattccagggaaaggattttgtgttggtagaagatgcggatgggtttgatattccaatgccgatacgcgagtgtgtcgtgattgaaacagatgactataatatgaggcgtaaacccggttcgtctgctccgaaaccggaagaaccagttaaaccggtaaaaccggagatgcctgtcattcaacgtcagccggaggtgcgtggaggagatactttgaatgtatttctggcttatgtgcccgaagacgcaaaagcgatgatgactactccttttgaaacttatctggtaaatgatagcaattattatttgtattacacttatttgagtgcagaaggaaaagcatggaagaaccgttcgcacggtttggtggagcctaatacaaaattgctgttggaagagttcaccaaggatgtattgaatgatatggagcgggtggctgttcagttgatagctttcaaggacggtaagcctgcggctatcaaaccggctgttagtgtggagatacggatcgataccgtgaagttctataaacttcatacctttagcgattctgatttctttgaagaaccggctttgatttataacattgtgaaagatgatatgcctgccaaacaagtatatgtttcggcggaggagattcaagaggctttgttgcagaagaagtctgtagataaaccaaagtcacaacctattgtgaaaccaaatcatactactcatggcggaaagagcggaattattgaaatagatcttcatatcgattctttgctggatgatactcaagggatgggcaatgctgaaatactgaattatcaattggataagtttcgcgaagtgatggaaacttataagaataagcgtgaacagaagattgtctttattcacggcaagggagatggggtacttcgaaaggctgtcattgatgaattgaaacggaaatataataattgccgttatcaggatgcttctttccaggaatatgggtttggggctacaatggtgactattaaataatagtataaaaaaagtggaagccaaccggcttccactctctctctcttttacatattaatcatttttacttattcagttcaatacctttattctgtaaagtgatattcatcaatgctgcatacttggcgtactgttcagcactaagagtctttctcatcagtttcaagttaccataaacagcgttgcgcaattttgcttctttatctttcttcgctgttgtggctcttgacatctgtgtggagaaataatcgcaaatattggctacttcttcactctgatcggagtttaactttaaatatttgcctagtttacttacattgatgttaccttcccattttgcagttgtaggctgatttccggctgcaaatgttgtagcagcaaggcagagcgctgccactaatgttaatcctaaacgtttcataatacctacttttttaattgttatacctaaaaactattcctaaaaacaaatctaatacctattgaaaatactgtctaagcgcttagttttttctttttacctatgcaaatataagaatatgttttatagcataaaaataaagaaaaggaaaagattctttttaggctgatttcttgatgtaagtcaagagatgatctgctttttgatataaaaacacctttttatgaaacatttttgtaatacgtgtacgaaaacgatagtagagtatttctgtattttaggatttattgctgttaaaatgatattgagcaaaggaacgtgactaggaaaggaacactgaaatcgacaacaaaaccatggaagatggaaatgattacaaattcctttcccgaatatcgggtaatgataggaagagtggtatccatcgttgtggctccaccaacagaaataggagctagctttccaaaatatttcactaataagggtgcacacagcaaagcgataatttcacgcatgatattggaaagtaatgcgatagttcccaattcgggacctttatattcggtgataaatatgctggagagtgagtaataaccaaatccggctccaactgccatacagtctagaggacttcgttggctcataaaagctcccgctatggcgcagcctgctaatgtgccgagtatcgtcatgataggaaggaatacaagccgaggattcagggaccgaaaactcttcagggtgttcggatcgttaccgatgctgatacctacgcagaacatgagtccgcagagggcatagtaactaagtttgctgtcggtgaagtcgtatgggataagatggtaaactccacaaagcgtgccgataatgaaaaaagagacaataatcaaactacctttcatgcttttgtctcctttcctttactatataataggtaccacaacccccatgcgcacagagtacttcctatgaccgcagctaccgtgatgacaacagcttccagcccaagagtgtgtaatcctttgatgatagattcattaccccctacatctattccgagaagaaagagaagaatccatataaggagagtgattatcttgtgtatccatgatagtcttttactgcgtaacaagtagccaagaagcatgcctgtcagcataattccaataatgataaacatagttagtgcctgctttttggttgcaaagatagtattaaatgtaaatcttggctaatctcttctacgatttctttcgtggcgattggtaggtatttggtcatcggctttttgtttgtttggttagtctacccaaagtaaatcactcattatactgtcggaaatgaaaataccttcacgcgtcaggcgcaaagccccgttgtattcctccagtttaccatttttcagataaggtgcagccattttttgacaatactcccacatttcattgccgaacatctgtttcagtttctctataggtgttccccatacggtacgtatagtagtgataataaattcgttgtagcgggtggttgggtccagatattctgtttcgaaagcacggcagtcttcttctataccttttatataggtgtcgattgaagacacattccattcccgtgtcattccgtcaaaagaatgtgccgatggtccgcatcccagataagatattcctttccaataggaagtgttgtggcgggaatattttccggggcggcaaaaattggaaatctcatagtgttcgaatcctgctttctgcaaatgctctatcagtaatgtgaaaaattctaaactggagtcttcgtctacctcggatatctggtgctgttttaacatattatatataggtgtatcttcctcataaatcaagtgataggcggagatatgttctacattcagactgatagcttgacggagatcgttttcccatcgttcttttgtttctccgggcaatccgtaaattaggtcgatactgatgttctggaaatcggcttttcggcatctgtcaattgcttcgatggctgtacggacattgtggcggcgtctcaatagtttgagcgtagcgtcatcaaaagtctgtattcccatgctgaggcggttgaaaggaagtgaggaaagcatttccagatattcctgcgataaatcatccggattagcttccagagtgatttcctggcaatgattcaatccgtagtgctcgcggatggtatcaaatatctgttcaaaatcctctttttccagttgagacggggttccgccaccgaaataaatagtttctatatcttctcctttcaggtattctttacgcatcgccaactcccggcagagagcctgtacataacgggttttgagttcgctgcgagtggttgagtagaagtcgcagtagatgcagcgcgttttgcaaaaaggaatatgaagatagatacctgccatagctatgctgtttgggtttgtgggtgtaaaagtaagactattattagatatatcaaaaaagcagttgacggaaattatttatagtggggtaggaatacgctaaatagataattccccatcgattagtagaagataatttcctgcaatgctgaatttaagatcttttcttttataaataagattcgaacttgtagccgggttttcgtttgacttaagtcaaacgatagaatgacttaagttaaactatcgcttgacttaagtcaaacgaaaactgattaggcaacggggaaactattgtatgaaaggaaaacaactaaaaataacatcgtgccggattactcgttgcaactatgaaattagtttatagctatgcgaaaataatttttaacccgattcgaaaatgttcatattaaagatgtgttacataacattgtttagtaacactgccataagtgttgcttttcccccaattaatccctaatttgcgcatcacaaaattaatggtatgtgagaaacatactgagtaattactaaaatcttatatattatgaaagtatatcagactaatgaaatcaagaacattgccttgttgggaagttctggctctgggaaaaccactctcgtggaagcgatgcttttcgagagtggtgttataaaacgtcgcggatctgttgccgcaaaaaacacagttagcgattattttcctgttgaacaagagtatggttactccgttttctccaccgttctccatgtagaatggaataacaaaaaacttaatattattgactgtccgggatcggacgacttcgtaggcagcacagtgactgcactaaatgtgaccgacacagcaattatccttcttaatggccaatacggcgtcgaagtcggtacacaaaatcacttccgttatacagaaaagctgaataaacctgttatttttctagtcaaccagcttgataatgaaaaatgcgattatgataatatcctcgaacagctgaaagaggcatacggctctaaggttgttcccatccaatatccgatagctaccggtccgggctttaatgcgttgatcgacgtattgttgatgaagaaatactcatggaaacccgaaggaggggctccgacaatcgaagatattccggcagaagaaatggataaggccatggaaatgcacaaagcattggtcgaagctgctgccgagaatgatgaaaatctgatggagaaattctttgagcaagattccctgtcagaagacgaaatgcgtgaaggcatccgtaagggattgatcgccagaggtatgttccctgtattttgcgtctgtggaggtaaagatatgggcgttcgtcgcttgatggaattcttgggtaacgttgttccttttgtatctgaaatgccgaaggtacagaatacggaaggtaaagaagtggctccggactccaatggaccggaatctctttatttcttcaagacaagtgtggaaccgcatatcggtgaagtttcctattttaaagtaatgagcggtaaagttcatgagggagacgatttgctgaatgccgaccgtggttcgaaggaacgtatcgcgcaaatctatgtggtagccggtggtaaccgtgtcaaggtggaagaattgcaggccggtgatatcggtgctgccgtgaaactgaaagacgtgaaaaccggtaatacgctgaacggtaaggattgcgactacaaatacaattttatcaaatatccgaactctaaatatacccgtgccattaagccggtgaatgaagcggatgtggaaaagatgatgagtatcctgaaccgtatgcgtgaagaagatcctacatgggtgattgagcaatcaaaagaactgaaacagactttggtacacggtcagggagaattccatcttcgtaccttgaaatggcgtttggaaaacaacgaaaaacttcaggtaaaatatgaagaaccgaagattccatatcgtgaaacgattacaaaggctgctcgtgccgactatcgtcataagaaacagtccggtggtgccggtcagtttggtgaagttcacctgatcgtagaaccttataaagaaggtatgcctgtgcccgaaacgtataagttcaatggacaggaatttaagattaccgtgagaggtacggaagagataccattggaatggggtggtaaactggtgtttgttaacagtatcgtcggtggttctatcgatgcccgcttcttgcctgctattatgaaaggtattatgtctcgtatggagcaaggaccgttgacgggttcgtatgctcgtgacgtgcgtgttattgtttacgatggtaagatgcacccggtagattcgaatgaaatctcctttatgcttgccggacgtaatgcctttagtgaagccttcaagaatgccggtccgaaaattctggaaccgatttatgatgtagaagtgtttgttccgtctgataggatgggagatgtgatgggagatctgcagggccgtcgtgccatgattatgggtatgagtagcgaaaaaggttttgagaaactggttgcgaaagtacctctgaaagaaatgtcgtcttactctacagctcttagctcgctgaccggcggacgtgcttcgtttatcatgaagttctctagttatgagcttgttccgacggatgttcaggataagttgattaaggattttgaagctaagcagacagaagaataacgtgtaattctcttaatactgttaaaaccgtcatcttttttaagtaaaaggtggcggtttttgtttaactatgattaataaagatggaaaaacgcaaggaaaagatttaattttttattaaatttgcaaaccaaagtaggggttttattgttgtagtaatcaaaatacaacctaaatggctctatacggttaatttccgggaagttccggttaaatcaagttaatgcattaggagtgttaattagggagtgttaattttgttgctatgaagaagtcaacaatttggatattaggtattgtaatggggctttcattcctcagtttactgtatttacaggtcagttatattgaggaaatgatgaaaacccggaaggaacagtttgatatggctgtgcgcaatagtctggatcaggtttctaaggatgtggaatatgcggaaacgcaacgttggttgattgaggatatttctgaagcggaaagaaaagcgttgattgagaacaatccttcgctgcaacagaataatatggttcagcagacgcaacgttttacgatgaagtctaaagatggaaaggtttatacggattttgaattgaaggtgatgactaccaaaccatccgaacttccgaaagctatgatctctccttatagaggatcaaaaacgatcccggagacttcgcgttcactgattgaggctatcaagaaccgatatatgtatcaacgtgagctacttaatgaagtggtctggcagatgatttatcgggcaagtgacaagtcgatcggagatagagtacggtttggtgatttaaacggttacttgaaatcgaatctgtataataataatatagacctgccttttcactttacggtgattgacaaggatggaaaggaagtctatcgttgtgcggattatgatccgaagggaaatgatgaagtgtaccagcaggccttgtttaaaaatgatccgcctgcgaagatgagtgtactgaatgtacattttccgggaagaagagactatctttttgattcgatcagtttcatgattccgtcgttgatatttacaatggtgttgttggtgacattcatttttacgatttatatcgtgttccgtcagaagaaattgacggagatgaagaacgactttatcaataatatgacgcatgagtttaagactccgatctccaccatttcgttggcggcgcagatgttgaaagatccggcggtcggaaaatctccgcagatgttccagcatatatcgggggttataaatgatgaaaccaaacgcctgcgttttcaagtggaaaaggtgctccaaatgtcgatgttcgaccggcagaaggcgactttgaagatgaaggaaatcgatgcgaacgaattgataacgggagttgtcaatacctttgccttgaaagtggaacggtataatggaaagataacatcgaaccttgaggcgaccgatcctgttatatttgcagacgagatgcatattacgaatgtcatctttaatctgatggataatgcggtgaagtataaaaagccggacgaggatttggaattgaacgtgagaacatggaatgaatcgggtaaactgatgatttcgatacaggataatggtatcggtatcaagaaggaaaacctgaaaaagatatttgaaaagttctatcgtgtgcatacgggtaatctgcacgatgtgaagggctttggactgggattggcttatgtgaagaaaattattgtcgatcataaaggaaccatccgagctgaaagtgacctgaatgtaggaactaaatttattattgcattacctttattaaaaaataattgatatggacgagaaactgcgtattttattatgcgaggatgacgaaaatcttggcatgcttttaagagaatatttacaggcaaaaggttattctgctgagttatatcctgatggagacgctggttataaggctttcttgaagaataaatatgacttgtgcgtgtttgacgtaatgatgcctaagaaagatggcttcacattggcacaggatgtccgtgcagcgaacgctgagattcctattattttcttgacagcaaaaacgctgaaggaagatattctggaaggatttaagattggtgcggatgattatatcaccaaaccgtttagtatggaagaactgacattcagaattgaagcgatcttgagacgtgttcgcggaaagaagaacaaagaaagtaatatctataagattggtaagtttacttttgatacccagaagcagattttggcaacggagggtaagcagactaagttgactacaaaagaatctgagttactcggtttactttgcgcacatgcaaatgaaatcttacagcgtgactttgctttgaagactatctggattgatgataattatttcaatgcccgcagtatggatgtgtatattacgaaactgcgtaaacatttgaaagaagatgattctatcgagattatcaatattcacggaaaaggctacaagctgattacgccggaagttgaatcttaatgcgatttacttcttgataactgaaataaaaaatcccggaaacattcgtttccgggattttttattgatttctgtgagattaatcagcgatcttcttattgataacaatataagaaatgagtcccagtactactaatactaccgagctgcccaatatggcattgttgtttacattgcctgtaaaggaacaagccagcaagatgactactccgaccaagattaaaatcaatcccaagttctttaataagcctttcatgtgtgtgtattttaatagattattatattccagtcacaaattaaagcataattctttaacgagcgaaattatttaaataaaaaatccattataaagataggatttagtggattttatgatttaaacggttgtttctctgtttaatctttcgtgttgaagaatacctttttcaatacttcctgtccgatactcaattcgtcgagagtaatgccgtgaagcgcctctttcaaggtctgtccggcaataatgcgcgctttttcttccagttctttgccgtctttggtcagatgaatcagatttgtgcggcggtctctcttgtccgagatacggacaacaaggtgctgccgttccatattatctatcaaacgggtcatactgggtttgtctttaaaagttgcattgcacaactcttgttgtgtaacaccgtctttttcccataggaaaatgagtaccgtccattgctccgggctgatttctaaaccgttctggcggaagttacggtatagtttccggttaattgccgcagaaactttaccatttaatatggcaaatataagccggatgtcgaagttaaattgctctatcatgaaattattgtttaaacaactttgcaaagttagttacttccgggataaatcctatcttcttgatacaaaaaaagattaaatgtttgcagttcaaaataaattgcctaactttgcacccgcatttttaaatcaaataatttatttatttaattaaacgaagtatgaatcaatacgaaaccgttttcattttaactcccgttttatctgatgttcagatgaaggaagcggtagagaaattcaaaggtattcttcaagctgaaggtgctgagattatcaatgaagaaaactggggactgaagaaattggcttatccaattcagaagaagtctacaggtttctatcagctgattgagttcaatgcagatcctactgtaattgacaagttggaagtaaacttccgtcgtgatgaacgcgttatccgttttttgactttcaagatggataagtatgctgctgaatatgctgcaaaaagaagaagtgttaaatcaaacaaaaaggaggattaatcatggcacaacaagttcaatcagaaatcagatacttaactccgccgtcagtagacgttaagaagaaaaaatattgccgtttcaaaaaaagcggtattaagtacatcgactacaaagatcctgaattcttgaagaaattcttgaatgaacaaggtaaaatccttccgcgtcgtatcacgggtacttctttgaagttccaacgtcgtatcgcgcaggctgtgaagagagctcgtcacttggcattgctgccttatgtaactgacatgatgaaataagaaggaggaaaagtatggaaattatattgaaagaagacgtagtaaacttgggttataagaacgatatcgtaaacgtgaaatccggatacggtcgtaattatctgatcccgactggaaaagctgtcatcgcttctccttctgcaaagaaaatgttagctgaagaactgaaacagcgcgctcacaaacttgagaaaatcaagaaagatgctgaagctatggctgctaagttggaaggtgtttctttgactatcgcaactaaagttagctcaaccggtactatcttcggttctgttggtaatatccagattgctgaagcattgtctaaactgggtcatgaagttgacagaaagatcatcgttgtaaaagacgctgtgaaagaagttggtagctacaaggctatcgttaagcttcacaaggaggtttcggtagaaattcctttcgaagtagttgctgaataagagcaaatttacttcatatatgaaaagcgatttgttctgaacgaataaatcgctttttttgttatctttgctattactattatgaaattcgactgttgttttctaaagaagaggtttttgcttctgctgattgctttgggaattggcagtgttctttatgcaaataatgagttgaagctattgactgattctttgcgtagagtgatagatgaaaaacacgtctttgttaaagagaaagaggatcggataaaccggataaaatgtatgttgagaagtcccggtttgactcttgaaggagaatatagaatcaatctacggttatataatgaatataaaaagtttcatattgattcagccatccattatgttgatcgcaatattgagatttcccgccagttgaatagaccttatttcaccaaccagtcgtctttacatcttagccttttatattcgatgtgtggcaggttccgcgaagcggagattattttgaaaagtataaagacttcagaacttcccagagatttattaataaactattatcaaacttattccagtttttggggacactattcgatttctgtcgccaacaatctgtatggcaagcagcaggctgcttatcaggattcgctgtttgccctcattgaccacacttcttgggattatcgaatgtcccaggcttcttattatatttggcgtgatacgctgaaatcgaaagaaatttataaagaactgctggagattgaggaagtggggacgcccaattatgctatgataactcattcatattccaggttatgtcaccatcagaaaaagtatgatgaagaaaaaaaatatttgatgttgtcggcaatagccgatacccggaatgctacgcgggaaaatgcatctctgcaatctcttgcattgatagcttatgatgaacagaatttagctgatgcctttaaatttacacagtccgctatcgatgacgttatatcttccggtattcatttccgggccatcgaaatttataaattcaattctattattaatacagcttatcaggcggagcaggccagatcacggtcgcatctgactacttttcttatttctacaagtattatcctttttcttttagtcctgttggtgcttttcatctatattcagatgaaaaagacgttgaaaataaaacaggcattggcacagagtaatgaggagcttttgcgattgaacaacaagctgaatagcatgaacagccagctgaatgatacaaataatcagttgtgtgaaattaatagtataaaagagtattacatagccgaattctttgatgtctgttttagttatatccataaaatggagaaatatcagaatatgctgtataaaatagctattaataaatactatgatgaactggttaagaagctaaaatcatctgcgcttattgatgaagagcttggcgctttatacactcgttttgataaggtcttcctgggtctgtatcccacttttgtttctgattttaacgctctgttgaaagatgaagagaaaattattttaaaaccggacgctttattgaatagagaacttcgtatttatgctttattacgcttgggtattacggatagtggaaagatagcgaactttctccgttgctctacaagtacggtttataattatcgtacgaagatgagaaataaagcagccgtcgacagggatgaatttgagaatgaaattatgaaaattagttcaacacaagagacataattatcattttaacattataatactttccaaatcatctacatttttttgatgtgtcaagttagctaagttattgattaatagtaaaaagaactaattttatatctacataaagtagtgtaagtcaaataagccgttatttatttggctagatttgcaatatcagtttttagctcatcagtttggtagttagaagttgatgttttatctattatttgtacttaaattcactatgtttaattatgaacacgcaatcttcagtagacacgagaattaaagttggaattatcggttttggtaggatgggaagattctactgggaagcgatgactaaaagtgatcggtggaatattgcttatatttgtgatactaatccggcatcacgtcagttagccaagaagctttctcctaactctattatattagaagataatcaaaagatttttgaggatgaaagtgtgcaggtagtcgggcttttcactttggctgactcgcggatggaacaaatagaaaaagctattcgttacggtaaacacattatttcagaaaaaccagttgcagatacaatggaaaatgagtggaaagttgtagaaatgacagaaaacacaaatctcatttctacggtaaacttgtatctgcgaaattcctggtatcataatttaatgaaggaatatatccagcaaggggaaatcggagagctggctattattcgtatttgtcacatgactcccggcttggcaccaggtgaaggtcatgagtatgagggacctgctttccatgattgtggaatgcactatgtagatattacccgttggtatgcaggatgtgattatagaacatggaatgcccagggagtgaatatgtggaactacaaggatccttggtgggtgcaatgtcacggaacttttcaaaacggggtcgtttttgatattacccaaggatttgtttatgggcaattatctaaagaccagacacataattcgtatgtagatattataggtacaaaaggggttgtgcgtatgacgcatgacttcaatactgctgttgtcgacctacacggtgtcaatcagaccatccgtgtagagaaacctttcggcggcaagaatatagacgtgttgtgtgacctgtttgctgattcggtagaaaccggaaaacgcagttcacgattaccgctaatgcgcgattcggctattgcatccgaatatgcgtggacattcttgaaagatacccgcaaacacgatttgcctgctattggtaatttaagcactttggagcaaatacgcgagcgaagaaaaaacatgaaaaatggatatggattgttgcacggcaaccttccaaagattattaacccttaaacaaataaaatcatgtcaaacatttcgaggagaaaatttctcaaaacgggagccgctgctttagcaggtataaccattgctcccagtacaattttaggtatgagtcacgggcatatttcgcctactgacaaattaaatcttgcagctgtgggtattggtggcatgggacatgccaacattaatcacgtaaagggcactgaaaatattgtagctctttgtgatgtggattggaagtacgcaaaaggcgtgttcgacgaattccccaaggctaaaaaatactgggactatcgtaagatgtatgatgaaatgggtaaatctatcgacggtgtgattatcgcaactgccgaccatactcatgctattatcactgctgacgcaatgacaatgggaaaacatgtatattgtcagaaaccattgacccactctgtttatgaatctcgtttgttgacaaaactggctgcatcaacgggcgtggttacccaaatgggtaatcagggggcatcggatgaaggtacggatttagtatgtgaatggatttggaatggtgaaatcggtgacgtaacgaaagtagaatgtgcaacagaccgtcctatttggcctcaaggattgaatgttcctgaaaaggttgataaaattcctagcacgttgaactgggatttattcacaggtcctgctaaaatgaatccttataatgctatttaccatccttggaactggcgtggatggtgggattacggaacaggtgcattaggcgatatggcttgtcatattttgcatcagccgtttaaagcattgaaattgcagtatcctaccaaagtggaaggttcatcgacattattgttgaatgcttgtgctccacaggcacaacacgtgaaaatgattttccctgctcgtgaaaatatgccgaaagtagctatgcctgaagtggaaatacattggtatgatggcggtatgatgcctgaacgtccgaaaggattcccggaaggaaaacaactgatgcagagcggtggtggtttgactattttccacggaacgaaagatacattgatttgcggatgttatggacagaatccttggttgctttcaggtcgtaaaccaaatgcaccgaaggtttgtcgtcgtgttcctaaagcaatgaatggtggtcacgaaatggattgggtacgtgcatgtaaagaagataaatctaatcgtatcatgactaaatctgacttctcagaagccggacctatgaatgaaatggtagcaatgggtgttttggctattcgtttgcaagctctgaataagactctcgagtgggatggagctaacatgtgttttacaaatatcggtgataacgaaaccattcgtactgttatcaaagacggattcaagattcatgacggtcatcctacatttgataagacatggactgatccgatcaatgcaaaacagtttgcagctgaattggtgaaacatagttatcgtgaaggctggagactgcctgatatgccaagataaaagtaaattaaaaattaaagattaaaaattaaatagttgatatcatgaaaaaagtattttatccattagcttgttgttgtcttgctgcaggtgtttttgcttcttgcggtggtcagaagaaagtaaatgctccggaagagcaaaaagttgcgttgtcttactctaaatcattgaaagcgccagaaacagatagcttgaatttgactgttgataaagatggctatatcactatttttgatggtgaaacatttaacggatggcgcggttatggaaaagatcgtgttccttctaaatggacgatcgaagatggctgtatcaaatttaacggttctggtggcggtgaagcccaagacggtgatggcggtgacttgatctttgctcacaaatttaaaaactttgagttggaactggaatggaaggttgctaaaggtagcaattctggtattctgtatttagctcaagaggttacttctaaagacaaagatggtaatgatgtacttgaacctatttatatttccgcacctgaatatcagattttggataatgccaatcatccggatgctaaattgggtaaggacaacaatcgccagtcagcttctttgtatgacatgattccggcagttcctcaaaactctaaaccgtttggcgaatggaacaaggctaagattatggtttataaaggtacagttgttcacggacaaaacgatgaaaacgtacttgaatatcatttgtggacaaaacaatggactgatatgttgcaagcaagtaagttcagtgaagaaaaatggcctttggcatttgaattgctgaataattgcggtggcgaaaatcacgaaggtttcattggtttgcaagatcacggtgacgatgtttggttccgcaacatccgcgtgaaagttttggactaatcgaatagcaataaagaaaggcacgggttacgtgtatttcacgttttttttgaatggcgattgccatggagtaaccgtgaagtctgtgtaatccgtgcctgtttttttctatgtaaacctgaataattgtaacccactaatatctattatatgaaaactagaatttatatctgtgcattggctgctcttttcatgattccactggcagtaacggcacaaaccaagaaaaaagctaaaaaagaagtagcaattcagctctattctgtcagagatatattaaacaaggtagacaacaaaaatggtaagtgtgaccccacttatactgctcttctgaagaaattggcaaacatgggatataccggtgttgaagcagccaattataacaacggcaaattttatgaccgtactccccaacaatttaagaaagatgtcgaatcggcaggattaaaagttttgtcttcacattgtacaagacaattgtctaaagaagaattggcttccggcgactattcaaagtcacttgaatggtgggatcaatgtattgccgatcacaaagctgccggtatgaaatatattgtagctccgtggatggatgtacctaagacgctcaaggatttagaaacatattgtgcatattataatgaaataggtaagcgttgcaaacaacaaggtttgtcgttcggatatcataatcatgctcatgaatttcagaaggtagaagataaagtgatgtatgattatatgttggaacatacgaatcctgaatatgttttcttccaaatggacctttattgggtagttcgtggacaaaacagtcctgttgattattttaataaatatcccggtcgcttccagatattccatgtgaaagatcacagagagattggacaaagtggaatggtaggttttgatgctatctttaagaatgcaaaaactgcaggcgttaattatctcgttgctgaaatcgagggttatagtgttccggtagaggaaagtgtagaagtaagtctggattatttattgaacgctccttttgtgaaaagttcatacgctaaataacgggtcaatgtaaaaacctgaggggtaaatttataaattgttatctttgtctccaaattcatagcttatggagttaaacggttatcgccttcttcttcctgaaggcactttagactactttgatcttgttgatgtgaaggaaagtgtaaatgaagttgtgttctaccttgaggagaaaaatatcgttcctgagaagtatacagatcaggatactgagagtaaaggcttttatgaccctgttattgttcaggattttcctctccgtggcaagaaggtcttccttaatattcgtcgtcgtcgctggctcttaaagaagcataatgagtatatctctcgtaactggcgtatggtggctgaaggtactcgtatgacgcaagattttgcgtcttttttaaaagaactatattgatagctatccgatcagttgcaagctcttaggtgttttatatggagttgacggggatttattggagcgtcaataccgtaaccatctaagtggttatctccattgggaccaacttgttcatgcagaggattggctactattcgaaaagaatatcggtgcttatatctgtattgatgaggtagccctctcgcgtggggaactctatactgtactgaccaataaagaagctcacggtggtaaaggtagtatgattgccatcattaaaggtacggacgttcatacggtcacttctgtcctgcttaagctctcccgtcgccgccgttaccaagtgcgcgagataaccttggatatggctcctaacatggagcagattgcacgcatctgctttccttcggccaaacgtgttaccgatcgctttcacgtacagaagttagcttatgaagctgtgcaggagatgcgtgtaaaagctcgctgggaggctttggatgaagagtccactcagattgcttatgcaaaggcctgtggaaagatgtatcatgcacctgttttcgctaatggagatacaagaaagcagttgttagcgagaagtatttatctgctttacaagaaggaatccttatggactcagtctcaaagaatacgggctgaaattcttttcaaggaatatcccgatataaagaaaggatattatctgtctatgcggttaggcttaatctatcatcagtgtaagtttaaggatattgctttgacaaggctggaaggtggtatgatgaagtagataaatcagggttcctcacctttggaagggtctcacgttctatacaaatacattatctgaatataatcaatttctttgaaaggagggcaaccaatgccgcagcagagttattcaatgctaaaatcaaagcatttagagcacagttcagaggagtaagagatagagcttttttcttatatagacttgctaaattatatgcttaaatatagaatccctcagattgttacgttgaccctaaataacgtgtggcttgctaaaataataaaataaaggcataaaaaaagtctgtgcatgctttcgcatggcagactttcaattctctctagctgtttctgaattattcagctacagtttcagttgcagtgctatcagcattcaaagaatctgctgctgcggctgctgcttgttcagcttcaagagctgctgcttctactgctgcgattgagtcagcgatacggatagaatctgcagttgcttttgctgcgtcagctgctttgttaccacatgatgcgaatgatactgctacgatagctacggccatcaaaactaattttttcattttctttgctttttaaaaacgtaatacaatcaattgctttattaaaacgatgcaaaggtatgtactttttcaatatgttgttctcgaaacgccaactttttttatatttttttttgtaactgggcacttttctcccctttttatatgttttagaacatgctaatcgacagcaatactgttatataagtatctttttatgcttcttttgggcgttttttcaaattcagtaggatagagttggatcttgctgattttctcataagcggctacgttgctgttcagattcttaagattttcatccatgattgttttcaggttatccggattatttaatccgagagaatccaacgcttcgtaatcggcataaacaagtgccactaattttttattgcgttcgataacaagactttcgagaatgaaaggcaggttattcagtttggtttccaactcttcggggaagatattctgtccgctagagcttaagatcatagtcttgagtcgtccccggatgaaaatatttccgttgctgtccatggaaccgaggtcacccgtacgtagccagccgtcctgcgtgaatacttcctgcgttgcttcctggttcttgtagtagcccaccatcacattttctccccgaacctggatttctccggtttctgcttccggggtttccttatagatacgtgcttccattatatctagaatctttccggaagaacctagtacaaattcatcccagggggcatagctgataagcgggccacattccgtcattccataaccgatcgtaaaaggaaatttgattttgtagaagaattcttctacttccttatccatagcggcgccaccgataatgatctctttaaaccgtccccccagtgcatcaatcagtcttttacgtatctggttgtagatttgggtgtcgagcagaggaatattgagtgcccacttcataccttttttattaatgagtggctggataatattcttatatatcttttcaatcactaacgggacggtaataataaggttaggtttcacttcctcaaaagccttcattataattttaggagaaggcgttttgccaagcaaagtgacatgggtgccgacagccgttgctgtcagaaagtcaaatgcgcaaccgtatgcgtgggcgaggggaaggaaagacagcactttatccccttttttaaggagttcggtacgaataccgaaagtgacattgccggcaagattgtttcctgtcagcatcacacccttactgaaaccggtggttccggaagtgtaatttaacagcatcactttgtcattggataaagtggtgtactgaacatcttcacgggtaaatcctttcggatacaaagcatgcatctctttatcggtatttttcagaaacttctgtatggtttccccgtcacgttgataaagacaccggaaatcagtcaatgagaatactccccgtagccccgttaatttttcctcttccagattctcccaaatgctgtcgctggtgaacaggaatacagattcggaatgattgacgatatgatgaacgtcattaggcgtaaaatcttgaaggatagggacaatgattgctccgtatgtgatcgttgccatataggcgatgcaccaatgagcgttatttttgccgataactgaaatcttatctcctctgcgaaggctacaatgtttgaataacagatgtaaacgggcgattttttcagctacctcaccgtatgtatattgggtatcttctccataatcagtataacaaggcagatcccaattctcacgaaaactattttcgtatagtttaatgaaattctctttaatcattgcacgttttttagtgaattgtgcaaaaataggaataaactttcgtatcctaaagtgttttactgataataatgtgtaactttgcaaagttaatgtgtttataacagcttatgatagataccactgtatttcaaaataagacagccgtttattatactttaggctgcaaattaaatttttcagagacttcaactatcggtaaaatcctgcgtgaggcaggagttcggactgcgcgcaaaggagagaaagcagatatctgtgtggtaaatacctgttcggtgacggagatggcggataaaaaatgccggcaagccattcatcgtctggtaaagcagcatcccggtgcttttgtggtagtgaccggatgttatgcgcaattgaagcccggcgacgtggcaaagattgatggagtagatgtagtgctgggggcggagcagaaaggtgaactgctgcagtatctgggaaatttgcagaaacatgaaaaaggagaggctataactactgcaacgaaagatattcgttcgttttctccttcgtgttcacggggagaccgtactcgtttttttctgaaagtacaggatggctgcgattacttctgttcatattgtaccattccgtttgcaagggggaggagtcgtaacggaactattgcttctatggtcgaacaggctcggcaagctgcagcggaaggtggtaaagagatagtcttgactggggtgaatatcggtgattttggtaagacgacgggagagactttctttgatttggtgcaagcgttggatcagatagaaggaatcgagcgttatcgtatatcttccattgaaccgaatctgcttacggatgaaattattgagtttgtatcccattcccgtagttttatgccacatttccatattcctttgcagtctgggtgtgatgaagttttgaaattgatgcgtcgtcgttatgatacggctctttttgcatcgaaggtgaagaaaatcaaagaggttatgccggatgctttcattggcgtggatgtgattgtgggtactcgtggcgagactgcggagttttttgagcaagcttatcggtttatttccggattggacgtgacccaattgcacgtgttcagttattccgagcgtcccggaacgcaagccttgaaaatagattatgtggtgtctccggaagaaaagcatcaacgcagtcaacggctgttggcactttcggatgagaaaacacaggctttttatgcgcgccatatcggacagacgatgtcggtgttgttggaaaagtcgaaggggaatactccgatgcacggatttacgaagaattatattcgtgtagaagtgggaagtgataactcattggataatcaagtggtcaacgtgcgtttgggagattttaatggggacaagacagcgcttaaaggcacaattctgatataagtatgaaatctaaacttatctattggctggtatatggtggaatgtggctgttttcagctcttccgttccgggtattgtatgtgctttcggatttcaattatctgttgatgtatcatgtgtggagatatcgccggaaggtagttcgggaaaatctggaaaagtcgtttccggagaagactgaggcggaaagattacagatagaacgtaaattttatcgttatctttcggattatatgctagaggacctgaaactgttgcatatgtccgctgaagatctttgccaaaggatgatttataagaatacagaacaatatttggaattgacggaaaagtatggaggtattattgtgatgattccccattatgccaactatgaatggctgattggaatgggatcggtcatgaagcctggcgatgtacctgtacaagtttacaaaccattgaaggataaatatctgaatgaactgtttaagcagattcgttcccgtttcggtggatataatattcctaaacattctactgcacgtgaaattatcaaattgaagcgtgaaggaaaaaatatggtagtaggtctgattacagaccaatggcctagtggtgatcggtattggactacttttatggggcaggagactgctttcttgaatggagctgaacgtattgcaaaaataatgaacttccctgtcttttattgtgaactgacgaagacacgtaggggatattgtgaggctgagtttaaattgatgactgaagctcccaaagagacagtcgaaggagaaattacggatatgtttgcccatgaactggaacagaccattcgtagagaacctgcttattggttgtggtcgcataagcgctggaaatttacgaagaaggaatgcgaacaaaaagaacaggaacttattaagagaaaagataagagatgaaagtatcagtcgtcattctgaattggaacggatgtgatatgcttcgtactttccttccatctgttattcagtattcggaggggaaagaagtagaaatctgtgtggctgataatgggtctacggacgactcggtaactatgattcagcaggagtttccatccgtccgaatgattttactcgaacagaatcatggctttgcggacggatataatttggctttgcgacaagtagatgcagagtatgtcgttcttctaaattcggatgttgaagtgacggaacattggttgaaaccgatgattgcttatcttgataagcatcccgaagtggctgcttgccaaccgaagatacgaagtcagcgccaaaaggaattttttgaatatgcaggagcggcaggcggatttatagataagtacggttatcctttttgtcggggacgtatcatgggagcggtcgaaaaagatgaagggcaatacgatacggtgattccagttttttgggcaacaggagctgctttgtttattcgtcgtatggattatctggatgtcggagggctggatggacgcttttttgcacacatggaagaaatagatctgtgttggcgactccgttctcgaggacgtgggattgtctgcattccgcaaagtgtagtctatcatgttggaggagccacgcttaaaaaagagaatcctcgtaagacttttcttaatttccgcaataatcttgtcatgctttataagaatcttccgcaggaggagttaaataaagtgatgcgtattcggacttgtttggattatgtggcggcacttactttctttctgaaaggggattgggacaatgctcgcgcagtgattcgcgcacgggacgaatataaacggatttgtccgtcattttcttcattaagagaagagaacctaagaaaaaaaactttgaatttaatacctgaacagataaaaagtagtatcttgtggcagttttacgcgagaggatgcaaacgattctctcaattgtcggacttaaaagaataacgaaatggaagcaaaggttagaaggggcatcgggctggtggcacatgatgcgatgaagaaagatcttatcgagtgggtgttgtggaattcagaattgttgatgggaaataaattctattgtacaggtactaccgggacactaatactggaagcattgaaagaaaaacatcctgatgtagaatgggattttacaatactgaaatccggtccattaggcggtgatcagcagatgggatcacgtattgtcgatgggcagattgattatcttttcttttttactgatcctatgactttgcaacctcatgatacagatgtaaaagctttgactcgtttggccggtgtggaaaatatcgtattttgctgtaaccgttcaacagcggatcatattatttccagcccgttgtttatggatcctgactacgaacgtatccatcctgactattccagttatacaaaacgtttccagaataagcctgtggtaacggaagctgtggaatctgtgaatagaaggaaaaagaaaagattataagctaccaatagaacttttaccataatttattgccacgtctgttattcttgattggttcggaatggcagacgtgtccgtttttattttctgctacaatggagctctattcctgccgattctatgtctgcccccatcggtgggtttcgtttggatagaaacagatcaatgtcttcaatagtagcgaattgtttgaatagtttcttcacaattcgtttccctacatgttcaagtaatttggatggaatatccatttctgtttttataacgttatatacctcagcatagtttacggtatctgtcacttcgtctgtctgcattgccttgctgatgtcaacacctagttttaggtcgataatatactcattaccaatcaaattctcttgtggggctactccatggtaggcgtaaaatcgaatccctttcaaaaagatatagcttttatttattttcatatactatttattatttagtatgaatctgtttaatttttaacaagtccttctgtgcaaccatttgcgggattactttcagaaagaggggggtgagtagaatacatatacttaatgttatgaacaaaagcattgttgcttgtgcccaactattatgaatgtagcgtgctatcaatggctctagaaaatggagtatgggaccgtgtatgcttagggtgatgatagagtaccttcctagataagaaataatttttactctttccacttttttgcaaagtagcataatcataaatattccagcgaatgcagcgatgtatacttgaaagatattcccggagtagttgtttgttctcattcccaatgtagtagcagtaaaatgcatgactaacaatgccaacaaaacgaaaagcggaattaacttatcaaaacggtgatgtggaaataagaagaagttatatctacgaatccagaatcctgctacatagaaagggagagccgtcatggcaatatcgagatagagagggagtgttatttgtgctttacctagataaaatcctgtacacccgatcaataaggtaagagcaaacatggcaggcagatatttatttcttaggaaatggactagataaaacaggatattgcagttgaataaggctactagaaaccagatcggcggattgaatttgataaggtcatgtccatgaaatactatcaaaagttctttccatgatacaggtaaatggaatactcccggtgctattttccaaatgatgtatttaaggaggaatgcacttagatagaagaaaagaaaagggataatcaacttgtttattttccgaagaatgaatcctgataaagcttcgtatggtttaaagaaaactcctgatataaaaaaatacagtggcatacggaaacaggataacatagagcccctatcgagttgctcgaaagctccaccaatatgtgtcatgactacgagaatgatgcagactcctttagttaagtctacaaaatcaatacgtttactcggggtctctttcattcttttaataatctgtttacacggattatacagatttaaaaatgaatttgtataatccgtgtttaatatagatagaagtcaaattatttctccgggtttcttcctgtgtattgtattaattcacttatcttgctattcagttctttggctttcatcagttgctctaatgtgatatgcatccgatatcgccaataatttcgtggattggatggaacgttgattcgttcttcttccacattaggatttctccattttccatcaactgacaaccaatcttgaaaagacagtatgcagagaatagaattactgttgaggtgattgcgtacaatctcttcacaaagttccggagttgcaatggcaggagctgtgccataatgtcctaacattgtattgtaataacgttgggtctgttgataatcttcttcccaccacccacgtagagtagacatatcatgagtggaaatggtgcacacagatcggtatggatattcatttaaatgtccgaactcatacgacgggtcctttggcattcgttgaatttccaaactaagaatacgtaactcgttcattacggaggacacacaagcgggaatcattcctaaatcttcgccacataccaacatacgggtagattgtgtcaattgaggtaactttttcatggcctgttggtaccaaaagtcgttgtggcgatgataataatactggttgtataatttgttgaaagcattcttgtcttcttcgctcaacgaacggaaaatgaaatcacgttgcgctccgatacggggatggtactttccttgttccttattgtccggaataaacagtacattactgattaaagaatataatccatcacggacccagatactgttttcgtcatttttaccggcaaagaattgtttgacttcttgttgtgtctcaaagccaggtctcatacggtaaataccggatttgtccactaactggagaaaatcttgttttacgagattgacataaggtccaaacacctgtccgagaaatgattcatgaatgaatggagacaggtattcttctcggaatgtgaaaccataattttctatctcttctctactcatcggtagggagggaacgaattgtcctaacaatccatgtacggcattcatcggtatttcccaaatacggaagaaaccgagaatatggtcaattcggtaagcatcgaaatattcggccattttctggaatcttttcatccaccagcgatatccgtccttttccattacatcccaattgtaagtagggaatccccaattttgtccgttgaccgagaagtcgtcgggaggagcgcctgcttgtccgttgagattgaagtaatgaggttctgtccaggcttccacactgttgcggctaatgccaataggtatgtctccctttagtacgaccccattttcacgagcatattttgtcgcagccaataattgcagatgcagatgatattgaatatagtagtataatgcgatgtggggataatctaccgtttccggttgacacatcttttctatctcctgtgcatcgtatacagaatgtctcggccattcacggaagtcggaggtccggtaagcatcacgcagatagctgaagactgcgtaaggtcgcaaccattctttgttagtttcgaagaactccttgaatttctcggaagccaatactttttccccttcttgctggaatatcagatggaagaattcccatttagcccggtttacagcctcataatcaatagttgtaagattattcagttcttgttgtttctgattgaacctagaggctgcttctttgtctttcagtgttcccatttgctttatatccgcatacatcggatgaaaagcatagatggaaatactgttgtagggataagagtccgtccatgtatgggtcatggtcgtgtcattaatcggtagaatttggatgaccttctgatgtgtgtttaccgcccaatcgatcatgagtttcagatcaccgaaatcacctactccaaaacttttttctgatttcagagaaaatacggggatggcaattcctgcacctttccacattggaatatcaaaatagacatatcggtcggaaatcacgagtgtctcgttcgtctttatttccgggtctgccagataacgattagggtttttctcccagcaatcaatttttctttcctgtttatggcaaaggataaatttatattccaaaggatatttgagcttgcttgcatctagctccacctgccattcggggaaattggagtcactcattaaaacggctttttccggatcccagttacctagtgctttctgattgccgcaaatggccagacaataatctttgttgatgcgcggggcataagcttttattattagccctttcttatacccttgcggaatgtctaccctttcgggatgtgataataatgcttctgtaaaggcagaactgtaaaggtatagttgctccgggatatttttccagcaatcattgattctatacttttttctaggagtaccggatagaaaaaggcatcgtggaaaattgttccattctttgcggatgacgattccgttttgttctatctggtagctataatggatagtcaatccttcttgaggaacttccagttccacttctgccgtccaatatataccgtctgtagtgtacattggggtggattccgtcgataagcctgcaagcttgacttcctccccccaattggtacggtattcgatattaaatgataagatcatatattatagaatgtttatccacatctggaagccccgcaagtggtacaaatcagacatccttcctgataaacgagagtttcattgccacagttcggacatttcttgccttttgcttcggttccatcctggatgtatttcttcagagcgcgttctacaccgtttttccaagtattgatattttcactgttcagttgcaaagaacctaccagtttaataacttgttctattggcattcggtaacggagtactccggaaatcaatttggcgtagttccaatattctttattgaacttctcagacaatccttcaatagtcgtcttatatccgcgcttgttttcaaattggaagtcgtaacgcttcgttccgtcttcatctatatttttgatgatacgtccgctagtcacgctcttaggtaataaaataccttcatcgtcatcttgcagaccggtgaagatttcataaggatgtccatctagcaggccaacgaaagccacccatttttctttgttattctggaaacgtacaacatctgcttctaatattcgtggacgcacttctacgaccgtaggcggtttgcaaggaggaagttcctctttcttgtttttgtcagatttggttgagataagtacaccggaacgggagccgtcacggtatacggtacaacctttacaaccggatttccatgcttccacatataaacggtttaccagatcctcgtctacgtcattcggcagattaatggttacgctgatggaatggtctacccatttttggattcttccctgcatctttactttcatcaaccagtcgacatcgttggaagtagctttataataaggagacttggctactaattcgtcaatctcttcctgagaatagcgtttggacggatcgtatccattggcttccatccatgtgacaaacttgtggtggaatacaatatactcttcgaatgcatctcctgtttcatcaacaaagtcgacatgaacatttgtgtcattcggattcacttttcttctacgtttgtaaactggcaagaataccggttcaatgccagaagttgtctgagtcatcaggctggttgttccggtgggagcgatagtcaggcaggcaatgttgcgtcgtccgtattttttcatttcttcatatagctcagggtcggcttctgccaaacgttggatgaacggattgttctgctcgcgtttgttatcatatatttcgaaagcaccacgctccttcgccatttctacagaagaacgataagcgccaagagctactgtcttatgtactttttctgagaattcggtagcctcttctgttccgtagcgtaatcctaatgctgcgagcatatcaccttctgcagtgatacctacacctgtacgtcgtccttgtccgcttttcttatatatcttttcccagagtacacgttctgcccgcttcacttcgtcgttttccggatcctcatcaatcttgtgcatgatgcgttcgattttctccagttcgaggtcgatgatgtcatccatgatacgttgagctaatgccacatgtttcttaaacagatcaaaatcgaaataagcattcggtttaaacggatttactacatatgaatacaaattgattgccaagagacggcatgagtcgtaaggacatagaggtatctcgccacatggattcgtggaaacggtccggtaacctaaatctgcgtaacaatccggtacggattcgcgaattattgtatcccagaacagaacacccggttctgctgatttccatgcattgtgaacgatcttcttccataaagtagaagcatctatttcttttgtaaatgtagggtcggaagaatcaataggatattgttgtaagtatggctttccgtcaacagcagcctgcatgaaagcatcgtctaatttcacggaaacatttgctccggttacttttccttctgtcatttttgcatcgatgaaagcttctgagtccggatgtttgatagatacacttagcatgagtgctccgcgacgtccatcttgagctacttcacgggtcgaattggaataacgttccatgaatggcacaagacctgttgaagttaatgctgaatttttaacgggagaacctttcggacggatatgggataggtcatggcccactcctccacgtcttttcatcagttgtacttgctcttcgtcaattttaatgatagcaccataagagtcggcagcaccatctacaccgataacaaaacaattggatagggaagcaacttgatagtcgttaccgattccagtcatcgggctaccttgtggaacaatgtatttgaagtgatccaatagatcgtacagctcttttgctgttaaagcattcggatacttcgattcgatgcgtgccacttcattggcaattctccaatgcatatcttccggagacttttcataaatgtttccgaaagaatcttttactgcatatttgtttacccaaactcttgcagcaagttcgtcaccttgaaaatatcgtaaagattcttcgtaggcttcgtcataagaataaatttgtttttccacgatgcaatgtgcgttaaatctgatttttaaataagtaatgtgtagaagtttacttatcgttaacaaatgtggatgcaaatctaagaatgttttttcatctatcaaaataaaaatgaaataatttattgacagactataagttttctatttattaatgataagtatttgataaacaggaaaatttgctttttgtttaaaggttaaagttttccaaaaagaaaactattctgttctgtagatatagcaaaatagatttttctttttatatctttgcaataaaaaagaaatgtttgaaaccgtaaagaacagaaggactatcaggaaatatctatcgaaggatattactcctgatttgttaaatgatttgcttgaaacttcattccgagcttctacgatgggaggtatgcagctttatagtgtggttgtgactcgtgacgctgaaatgaaagagaagctttcaccagctcattttaatcagcctatggtgaaaagtgcccctgttgtacttactttttgtgctgattttcgtcgcttttcaaaatggtgtgagcaaagaaaagctgtacctggctatgacaatttaatgtcttttatgaatgcgtctatggacactctgcttgtcgcacagactttttgtacgttggcagaggaggtagggctcggaatttgctatttggggaccactacttataatcctcaaatgattatcgatgcactccggttgcctgaattggtgtttcctttgacgacaattacagtcggttacccggatggaattcctgcacaggttgatcgcttgcctttggaagctgctgtgcacgaggaaatgtatcatgattatacaccggaagaaatagacaaactctatgcttataaagaatcattgcctgaaagcaaacaatttatagaggagaataagaaagaaactctagcccaggtctttacagatgttcgttatacgaagaaagataatgagtttatgtctgaaaatctattaaaggtgcttcgtcggcagggatttttgaaataatagtgaactgaaataatggttagtgattagtgaataggtttgtgaagcatgaatcatgagcctaatcactagtcattaattccttttctttttagtaacgcttcaatttcctgcacttctgcgttaaaactcttatctacttccagttgtcctttcacggttttgcaagcgtgaagtacggttgcgtggtctttgttgccaatgaatttaccgatcttagaagttgaaaagtctgtgtgatttttagctagatacatggcaatctgacgcgcttgcaccacttctctctttctggatttagtatgtatagctgcaggctccaagtcgaaatgtttacatactaccttaaggatatcatctatggtgacggctttcgtttcattgtgaacaacaccgtgcacgatatgttgagccaaatccatatctatttccttattgaaaatagtagaacgtgccatgatagcaataacgataccttccaagtcacgtacgctttcattcacattttcggcaatataatcgattacctcctctggaaattggagtccatcgcggtgtattttattgcgcagaatatttttgcgaagttctacggtcggtttttccaattcagctaccataccccatttgaaacgggtaagcaaacgttcttcaataccttgcaacaatacaggagcacggtcggaagttaatataagctgtttgccgttctgatgtagatgattgaagatatggaagaaattgttttgtgttttggtaacaccggcaaattcctgaatatcatcaatgattaatacatcgatggtctgatagaaattaatgaagtcgttggttgtgttgttacgtacagagtctgtatattgcacttggaataaatgtgccgatacgtacaagactcttttttctggataaatctctttgattttcgtaccgatggcattagccagatgtgtttttcccactccagaagctccataaaggaataatgggttaaaagcagttcctccaggttttagcgctacggcttcggctacacttcttgaaagtttgttactgtatccttcaatgaagttttcgaaattataattaggattcaaatgcggatctaaatcttgaacagcaggagcctgcaagaaattaggagctttgtttccatcaaatatgtttttaggagttacagccgtagaacgattgcttgcttcgagattcacggtttggtttggaatcgaagttttgtctaccatgacgttgtacatcaacttggttccttcgccaatgaccttatacaaagtcttgcgtattaaatctacaaatctttcctccagaatctcatagaaaaactggctgggaatctgtaaatacaaagtcttgtcctcatattttaatggaacaataggggcaaaccaagtgttgtatgtcgtatcgggaacattgtcttttatgatatcaagacagcggttccaaagtacgacatgatttgattctatcatagtaacttttaatacatttattaattaagcaaaacttctacgtttgcaaaattgggaatcttattcggaaaaaacaaatctattttttcttgtttttttcaagtgaataataacatgtttactttcaatgacttatgtgcttatgtctttgtactatcactaatcccgcttttgctattttgtaagtgtctgttatatagaatattatatataaaagctctgtttttcttctctcattctcatgtttgtataggaatcttatttcggtttatagatagacatttgagatgcaaaaaacttgctttttatagcagttcgttatttagataaaatctatataacgggattttattacttgtctttctttccgaataaggagaagtgaacgtagcgcttcgggtgctctttcaagtctttcaataagcctgctgcattttcagttgtagcatttagattattgtataaagtcgggtcgttgaagagtaatccgagtgtgttatctttgctattcaatttttctgtaagcatctttacattggataatgtttcgtctattttcttgaaagtagctgcatagtcaacttctttaagattaccgctgatggttacgaagttgtctccaattgtattcagtttgctggtaagctgtggaatatcattgctcatgagacctttaacctgagaactgactacggccaagttggcagtggtcttttctattgaatgtagggtggcaggaatactcttgtcacctaaaattgtattcatagaaataaggatagaatccagtttaggtaacatttcctgtacttgtggcattaactttgccacactttccatcattccattattcagtgtaccgggaatagtatctcctacggcatatttttcgcggggattgtttgccaaaagaatattcatgcgtactcctcccatcagttcggataccagttcggcgctacttcctttaggaattcgtagttcggtgtccagttctacttctacaaccacatttccgggattagtataatcataaaatatatcgcgtacaatacctacacgaacaccgtctgcgaatactgggctcgacttagtcagtccgttaacattctgaaatttagcatagaaatagctggaaggttgaaacatatgtattcctttcagccagttaatcccataaacaagtacacacagtgcaatgatacctgcgatacctattctgacttcttttgtaatatacttcattttatcttttatttatttcttcttttcttaaactcggcaattgcttcattgacattcattttttcaccgtctcggaaagcgatgataaaagcgtctttgaacttggctgtaatagtacgtttggtacgtagtaccttattataatcaccggaggcaccatatgtgtatttatatatatctttttctttataataatctacacctttcaatcctttcagtctcttgtcatttttagcaagaggtttggaagaggtaagtatttgtatcttaaacgtaatttcattgtcattagttgcactttccgcaaccttttgaacggttacgggtctatcgttttctttctctatatcttgttctttttgttcagtcggtattacagtcttgctgactccggttagccgtatttcgtgctctcttttataattgagaaaagcatgataaatacctttagccatggttgtagctcccgtttcggagttcagataacgttcctcctcaggggtggagatgaatcctaattctatcagaatacttggcatggcacttgcttttaagacgaggaagccggcttgatgtactccacggtctaaacgtttgcaagtatgacgaaattgtttttgcatcaaagacgccaggtgcacactttgttccatgtatttatcctgcatgaattcaaatatgatataagactcagctgagttaggattgaatcctgcataccgagtctgatagtcgctttcgtagagaattactgaattttcccgtttagctacttctagattggcgtccgatttagccaaaccgagtgtccaggtagatgctccttttgcagtgcggttgtttgccaatgcattagtatgaatagaaataaaaagatctgctttcgcattgtttgctatttccgcccttcgatctagagggataaaaacatctttgctacgggtatagatcactttaacgtcatcacaattgttttttatcagatttcctacttttaaggcaacgttcagattgatattcttttcttttgagatttttccaatagcgccggggtcgtgtccgccatgtccggcatcaatgaccacgacaaaatctttaccccataaatggctggtgcataagggtaagaaaagaagccagaggcaaatgcatatatataatatgtaggatctattcagtttcatatttataatacgatgcaaatgtagtagaaatttatagaaaacttattatttgccattaagttttgtgtttttttcggtttaatgatagcttttttcctgaaatctccgttactttgtgttccgaagttaaaatgtacgatgatgcttaagtttttgaagaattggacattgcctattgccatgttggtgggtgctgtgggttatccgttatttatctgcctctcttttttgactccgtatcttatctttacgatgttgctgttgacattctgtaagatatctccgcgcgatttaaagcttagaccgcttcatgtatggttattactgattcagattatcggggcgttagctgcttatttgctgttgttccggtttgataagattgtggcggaaggggtgatggtttgtattatttgtccgacagccactgctgctgccgtgataacttcgaaactgggtgggagtgcggcaagtctgaccacttatacgttacttgctaatatcggagctgccattgcggtacctattctttttccattagtggaggttcatcctgatgttagttttttggaagcgttctttgttattttaagcaaagtatttcctctactgatttgtccgtttctggctgcatggttattgagcaaatttttgccaaaaatacatcggaaattattgagttatcatgaacttgctttctacttgtgggcagtttcgctagctatcgtgacggcacagacgctgtattcgttattgaatgaccctgcggatggatttactgaaattatgattgctgttggagcattggcagcttgttgtttacagttcttttttggaaagactatcggctctatttataacgaccgcatcagtggcggacaggcattaggacagaaaaatacgattctggctatctggatggcccatacttatctgaatccattgtctgctgttgcacctggatcgtatgttttgtggcaaaatattattaatagctggcagttgtggaaaaagagaaagaaagaattaataagctgaatgtaagaagctgatttataggtattttctgtttgtgtatgttatttcctttgttttccttgttttcttgctttagcctataaattcctttattttgttaccagtttgttactcaaacgctattgagtaacaaaaataatatctatatttgccatcggtaacaaaataaaaacataagtatggcgaagaagaaacaagaggtcaaattgaaagaacctgtaagaatcagatttaagcagcttgccaatggtaatcaatccatctatttggattattacactggtgatgtgattagaaaagaaaattatgttggcggtaaacggcaatatgaatttttgaagttgtatctaatccccgaaaagacaagagaggataagactaagaatgaagcgactttggcacttgccaaagctattcagagcaagcggattgttgagttgcagaatgatgcgcacggttttcagaatactaataaatccaaagcaaacgtgcttgactatttgttggatatgagagcgcaatctaaggaacgtggtagtctgaattatgaaaagactatcgggaataccatccgtgaattgaaattgtttagaggagattatatcgcttttcgtgatattgataaggatttccttagtagttttgtggatttcttaaagcaggcaaagaaagcgagtaaatacggagtaacaaaagcaggtggattattaagcaataattcggtggttgcttattatggagtattgcggactgccataaatagagcttataaggatggcattataactgtaaacccaacaaaagagtttgactttgccgataaagtaaaagcagaagcaagccgtagagagtatctgactattgaagaattgaaactcttgataaatacggaatgtaaatatgagataatgaaacaggcttttctttttagttgcttatgtggattgcgaataagcgatttaagaaagctaaaatggaatgatttacagaaaagcggtgatagaattagaattgagataaaaatgcaaaagactaaagaaccgctttatcttcctatatccgatgaagcattgaagtggttgccacagagaggagaagccatagacagtgatttaatctttcctttgacacatgagggaacaataaataaaacacttcaacaatgggctaaagcggcaggagttactaaacatatctccttccatgtttcacgccatactcatgcaactatgatgctaacattaggggctgatttatatacggttagcaaactgttggggcataaaaatattgcaactacccaaatatatgcaaagattgtagataagaaaaaggaagaagctataagtttgataccgaacttaacagactaatttataagaaagtacggactatggcgaccgtactttctttctttttttgcccttgtttcacaagaaaaacatatctttgcttctactaactgaaacatagtatcttatgacagaagaagaattgaaagtaaaattcgaccatatacaaggcatattcaaccgttgtataaatcatgcctatcaaattataacggatagcattgttgcgaagtctgaatatttgaaccgtgaacaggctgatgaactggaacagcaggagtacattcgtaccacagatgaattggcacaactttatatccgttattccgtactggatgatattcaaaatttttactcgatacccgatttcttttgggaaagcggtttttatgaagccttgaagcccgatgaaaaaagaaagtaccttttattctctcctctttcatttgattattcccgatatgaacaggaaaattcagtctatgatgaagaactgccttatttttccgtagtagttagagttgttgtattggaaagatattcagcatacttgcgaaaaaagaaagagaacagaacgcagatggaaacacaaccgcagccggaacaggaagtgcagaagcagataacaaacaccgagtttccgataaaagccgtaccccctattgctgaaacagaaaatccttttgattcagttcttaatgataaacagattgaattaattgcggattgcatcaacgaggtaaagatgtttaatgcttctgtaaccgttgatgacttgaaagctatactttcttgtaagccgaatgcaatattaaggtcaaacaataatagatatgtagcttttcttttttcagaattaagtaacaggtctttgattactactaattggcaatcggtcattgctaataataaactgtttctttccaaagataaaagtagggataaatacctcaatcaaggagatttagctacagcaaccaattatgtgaaaggcatctcccatgagaaaggatttgcaaccatatacaactatatcaaacaactgaaaagactttaagaacaggttaagacctcaaacatagcttaatccactatcaagctaatcctcaatacctttgccctcgttaacgaaaagaaaacgagggtgcgcaccttcatattgtttcacttaatccaaaagacaatatggataagacattagagaagcgagttgaggaactcgaacagatgttgtttttaaccaagaatgtgtttagctttgatgaagcgagcaagtttcttaatctttccaaaagctacctgtacaaactgacttcgggtaacttgataccccactataaaccgcagggtaagatgctgttttttgaacgggcagatttggaggcatggctacgccaaaatcccatcaagacacaagcgcagatagagcaggaagcgcagaagtatattcttagtaaccgtcctttaaagaagtaaagctatggaaaacaagaaagtgacggagaataagaaagaagctgcactgacaagagaagattttgcagtcttgtggaaaaccattcatttgaagattactgatacctatgatgtaccgcccgaaattctttgggtaaatgattcaactattggcacattgggaaatttcagcgcatccacaggtaaagccaaaagtaaaaagacattcaatatttccgctattgtggcggcagcgttgaagaatgacgaagttttgcactattcggcatacttgccagacaataagcgtaaaatcctttatgtagataccgagcagagcaaataccattgccacaaggtaatggaacgtatcatgcgcttggctggtcttccgactgataaggatagggatgactttatctttgtcgtgttgagggaatgtacacccgacaagcgaaaacagataatagattatatgcttgccaatatggagggaataggtcttgttattatagatggcatccgtgatttgatgtatgacatcaatagccccagcgaatcatcagaacttataaatttattaatgcgatggtcgagtgaatataatttgcatatccacacagtactgcatttgaataaaggggatgataatacacgtgggcatattggaacggaacttaacaacaaggctgaaaccgttttgcagattaccaaaagctcgcaggatgtggatattagcgaagtaaaggcgatgcatatccgtgacaaggactttgaaccgtttgccttccgtatcaatgaaactgcattgcccgaagtcgtgaaagattacgtttttgagcaacccaaacagaaccgcaactttccacttacggaacttacggagcaacagcaccgtgaagcgttggaaaacggatttggaaaggatgtagtgcaaggctatcccaatgttatcgcagccttgaaaaaaggttacgcaagtattggttttgaacgtggacgcaatattcttgtggacttgaacaaattccttgtaaacaaacgcatgataataaaagagggaaaaggctacaagtacaattctgatttccactactaaaagcaagtttggtttagtccgtgtgtatatataaaaggaatggacttcttttcattgtacgattaagtacaaggtaagtttagtacagttcgggtgcatatatagcggactaaacggaactgattcaattattcattcactaatacattcagattatgacaatcgaagaatccaaaaatataaaattggcagattatctgcatagtttaggctataacccgataaagcaacagggcaatagtctttggtataaatcaccgttgagagaggaacaagagccttctttcaaagtgaacacagaccgtaatttatggtacgactttggagtcggtaaaggcggcaacatcattgcattggcacaggagctttacgcatccgacagcttaccctaccttttagaccggatagcggagcaaagcccctctatccgtcccatttctttttcctttcgtcagcagtcatcaacccaaccgagtttccaacatttggaaacagtgccgctttcttctcctgctttgtttgcatacttgcaggatagaggcataaatacaacacttgcaaaaaaagaatgtatggaagttcgtttctcgcttaacggtaaatggaactttgccatcggctttcctaacgcatccggaggttatgaggtgcgcaataaatattttaagggctgcatagctcctaaaggcatcacccatatacggcagactggagaacctaaaacaacctgctatgtgttcgaggggtttatggactatctttcttttctgaccttgcgacagaaaaattgtcctgattgtcccgattttgacaagcaggactatcttattctgaactctgtttccaatctttccaaagccttgtacccgttggggaactatgagagaatatattgttttttcgacaatgatacggcaggaataagagccgtacaggaactttataaagagtgtagtttccgtgtccgtgattcctcacgcatttatagtggctataaagatttgaacgattacctgtgtgaaaaacggttggtacagtcggcagacttaacacagcagaccaagcaatcacggacggtcaaacaaaccgacagacaggaacaacaaccagccaaaaagaaacgcagagggttcagaatgtagttgccacacacttcccacaggcttttgagtaaggaaaagccatagctcaatagggcgttttcttcacgcagtgcaagcaccgctaaaaacaccctatcgagcaaaggggcgatgccccttttgaaaccccgtgagccatgcgacaaacacgcagtgcgagcggaattgtctaacgaaaaacagattacaacatgggatattttactcttgatttcaagaaagcaaagggtacatccgacgctcgtatgtccgaccatatcgagcgcagggtgatagctccgaatgtggattctacacgtacacatcttaatcgtgaactggtggaacttcccgaaggtgtgacggtacgtgatgaagcgatagtacatcgcatcaagtcggcaggtatcaaacggaagattactcccgaccaagtaagggctatccgtgtcatgatgtcgggaacacacgaggatatgatgaagatacagcaagacgggcgtatagatgaatggtgcaacgacagtatggaatggttgcacaagactttcggacgggagaataccgtttcagcagttctgcacatggacgaaaccacacctcacatacacgccaccatcgtaccgatagtaacgggagagcgcaggaaagcaaaacagaagcaaacggagggtaagcgttcctaccgaaagaaagcggatgcagcccgactgtgtgccgatgatgtattgaaccgtgacaagttgataggttaccatgacgattacgccaaaatcatggataaatacggtttgctgcgtggtatgcgtggctcggaagcaaagcacgtcaccaccgcccaatattaccgtgatttgaaacggcagatgggagaactcgaaacagatgtacatcaacttcaaagtgagaaggatgaagtggaaaaacaactgaaacaggttaagaaggaaatcaagaccgacaagctggaagccgttaagaccgaagcgaaaaccgccattatagcaaaggtaggttctcttttgggtagtggagaaattaaagaactgaaacaagagaacaggcaactgcatgaagaagtcgccacccgtgacgaaagcatagaaaaattgcaaaccatgatgcaggagcagcggaaacaacatcgtaaggaattaacggaggtacaggcaaagtatcttgaaacactggacggaaagaataaggagatatcacgccttagccgtatcattgagaaagcctgcaaatggtttccgctttttaaggaattactccgcattgaaaagttatgccgccttgtcggtttcaatcaggaattgacagacaaacttgtaaaaggcgagcctatagtatgcagtggtaatttgtattcagaggaacacaaacggaagtttgcaacggaaaaggctggtttccaagtagtgaagaatccgacagataatacgaagttggttctaagtattaacagacaaccgattctcgactggttcaaggagcaatttaataaactttgttcaactatgcagccaaaacaagaacagaaaaaaaacaaaggttttagattgtaaaagattgaatttgatgtgaatacagaaaaaagtgcagtttatagttatttaagagctgcacttttactatttttgcatatagcttaactttaaaatcgaaaatatgcggttagaaaaatggttcatttcaaatttggatgattctcagcggcaaattattgtgcgggatccaaatgaaaatttgatagttcaaggcactgctggtagtggaaagacaaatcttgcaatccatagagcgatgcaagcaagcgcatttgggacctatgcaataattatatatactatagctttaaaacgtatggttgcatatggtatggctgcgcttggtttggataaagaaagaatagcgtatgattgggcttggagtcatcgaggttttgatttcgatggttttgtatattggaagaaaaacaatacgtctagtttatatttggtgcaggatttaaaagttagaaaattcaaggctacaaacttgacttatattcaatcaaaagaacgatatccaacttcgttgctggctagtatagactttgccgattgggtagattataggttttatcatgcattcggaaggcgtattagttggttcatagaagttcctatggatgaaacctttgatgtcaataatgaacaatttgagcttattcctagtggaactctttttaaaaaagcggaaagtaaaattgactatgtaatagttgatgaagcacaagattttgatgttaatgattataacaaccgttttcttccaaatgtcaataagagcattactctttttggagattctgctcaaaaaatttattccaaccgtggcgcaactatggatacaataacaagtacgttaaggtataaacgttttttcttgcgttataattatcgacttcctaaatctatcgcaaaagtggctcaagatattttgtctccttcgatcgacttgctaacagataatatgaaagatggaggtaatagtgattatcctaactatcctaagcctgttgttttgaaatatgattcaagggaggatgagttaaacggcattctgaatcgaattcaattggaggatttggatgatgtcgcaatcttagtcccaaaagaggaagacgtaaaagaagtaaataatttttttgctaaagcaggtcttcagacacaagtacattatcgtagtagaagagagattccttttcggacaataaacacattggacttctctaataatgatttaccttgtatcttaacataccatgccgctaaaggaacagaatttgataatgtgtttattccttttgctaatgatgcagaattgcctgataggaatgcgttctatgtagcatgtactcgttcttctcgtgcattatatatatcttactcaaaaaagaaaacatcttatttagatagaattaatcctgattttgtaatagaacaggtaattaaacaagaaagaaaagttgtagaaaatagctcaaaaaaaatttcagttgttgatgataataataatgatgattggaatgatgactatggaagtcattatggaaaatatgcaggaacgtatgctcaagatatagctggttttagtgatgatgttatagatgatgcttttgaaggcgatcctgatgcatattggaatattgattaactttttaaatatgtagtatgaaatattggttgttaatagattcttggaatttaatggaatcttttgtcacagaaagcatatctccctattcattttatcaggaacgtggctttggaaataatcttagccgattttttaaagtgggtagtgagaaaataaaccatctgattctctctactagagagcctgtaggagaatatgccgttgaaatttctgatgagttgttagatgttgctttgctcgttaaaagtggaaaaaagaaaactgtgtttacttatccaaaaacaatctactatagaaaaggttccgtacgatttcggttctttagtagagagaagcaaatcgcatttatcgctgaatctaagattttactagaggttaaatgtgtagaaaaatatctcaatgatttttattttgataataaggcaaaagtaaaagtcagtgaaaaattcagtgacgcatttctctttgaaaagcaacaatacctagcttttgataacaaatataattctctaaaaggagcatttgttggctatgtacgggggcaactcacctctatggataatgggcagcaagagttattatcacatatgatagaattaaagaattcttttacaggacttcatacagaattgatgctgggagaagatgctgtacatgatatgctgattttgcaaaaaatatttcagtgtaaattggaatacagtaagttagatatagaagcaaccaatctttttgatatacttagtcaaatatttaaagaagttgtaaagttggcatctatgcgaagccaagaactaaaaaggcaaaaaacacctgcatatgagaaagaattagaggaacttaaacaaaaacgtgaaaaatgtgctcatgcgttgaaccgtttagaagatgggtttagctttagtcgcataagggatgaattaaatcagataaaacaaaaggagattgaaaatggagaaaagaaaggcaaaaaacgagaatattttaagaaagaaactccagaatatagaagaaaagtagagctaaaaaaaatgcttgatgatttcgaagagaataatagtgaatataaaacgttaaaacaagaaataaagaatatagaggagcgtatagatagctatcattatggttcaacagaatatgattcggctgtaggagcattgttccttcgtctaagtgatggggtaaatgatttgataaagaagataaacaaatcaggtcagtctcattttgtggacttttcaagaattaagattattgatgaaaaaatgatgctacgctttggtaatgaaactgttgtagaatctgtttattttaatatagtcttacaatatatcttggagcaatctttaggaggtgcccgttcgatttctgaaatagatatattgaatcttatttttgctacggctaagatatttaaaaatacagaatattctaagacagttactggacaagaactgttggtttcattgggacaatactggagatataagaagcaagagttggatacattctctatcccttcgcatctacctatttttcaatctattatgtctttctttataaagccacaaggatttgagcaaatagaacggtttatgctaaataggaaataccgatataaggaatatgctttcatgttatggggagcatatataggctttgctgctattccgaaaacatttacaagtgttatatatcaaaatgatgaaattgataaagaattagattgctatttaaatgatatattggttaattaaaagattgagtttggtattttattaaggtttagtttattcttttgtctatattatccaaagttaactaaacctctttccatgaacagcaaaatatgtacgctggcgaaaagagaaaaacacctttgttctcttttcgccagcattatttttgtacttttgtcgcatataacaaaatgcaaatggatataaatcagaattatagagaagcggtgaagaccataaaagaagctattctgcgcagccagtaccgtgcagccacatcggtgaacaaagaacagctatctctttattacggcatcggacgttacgtgtcgaaaaattcccgtataggcttttggggtaaaggagcaatagagcaaatatcttctctgttgcaaaaagaattgccggggttaaggggattttcaacttcgaatataaagaatatgcgagttttctatgaagaatgggaacctgttctaaatcgccagccactggctggtgatttggtattagatgaaaaattgctgttgagcgtaattcgccagccactggctgccgaatttaactggactgatttcctatcaatcggttttagtcatcataccgaaataatatccaaagctaagactttggaagcaaggctattttatatacatgagtgcgccactcgctattggagtaaatataccttaagggattacttaaaagcagacctgtacagtcatcggggaactttgcctaacaattttgcacaaacattgcctgatactaagcaagcactaaaagctgtttcttcattcaaggatgaatacctgcttgatttcatcaatgtggaggaactgaatgaacaggaggaggatttagatgaaaagatagtagaaaaagcgattgttgctaacgtgaagaagttcatcatgacctttgggcaagatttcagttttataggtaatcaatatcgtattgaggtggcggaagaagaaatgttcattgatttgttgtttttcaatcgggaactcaattctttggtagcggttgaattgaagtctgggaaattccgcagttcctatttaggacaactgaacacctatctttctgcattggattcatatgtgagaaagcagcacgaaaatccctctatcggaattatcctttgccgggaaatgaaccaaacctttgtagagtttgcggtacgtgattacaataagccaatgggtgttgccacttatcgggcttccgaagatatgccggaacgacttcgcaaagcattaccggatattgatgaattgaaaaagttgttgtagaaaacaagtttagttcgttcctttgtctatatatccaaaacaaactaaacttatttctattgacagcaaaatatatatgctggcgaaaagaggaacagtctttttcttttcgccagttttgttttatggttaaagggcttttgttacctttgcataagaagcccaccactaagcgaatttcttcgtttttttgttactattttgttacccactgttagtaataggtgggcttcttctttgataatcagattaatatgcttgctaatatatagtaagcatccgataaagtacacattgtagacctaaaaactcttctattactttgcgatcaaaaacgtagttatgaaacgatcaatgagtaaagaagagtttttagcgctatatcagcgccaacagtccagcggactaaccataaaggatttctgtgataatgaatcgtatcctgcttcctgttttcattattggaagaaaaaatatggattgagtcacccatataccaaacacaccgaacctgcaggtgattcgtttatccctcttaatattaatcatactcctgccattcccacttcatcacgtggtgacaggcgtgtaaccatagaacttccatccggcataaagatccacctcaacatcctaagtaatccggagattatttatggcctgatcagtaaattatgtagccatgttctgcctgaatgatacgatgcgctacttcctgtgtcccgggaagacagatatgcgcaaaggaataaattctctttgtgggcttgttcatgataaaatgggatatgacgttcgacttggcgatgtgtttatctttgtcaaccgaagcagaacaaccatgaaacttctgcatgccgaagacggaggtatggttttatacataaaacgccttgaggaaggtaccttcagacttccttcctatgatagtgaaagccgttcctatcccatggaatggcgtgatttagtactgatggtggaaggcataaccgataatccgagtgatagactcaaacgtcttaaagccggtcgaaaagaaggcttttattgattaaaaagagcttcctaaacttgtatagctgtacgattttcagtatctttacattataataagatactaaaaagaatgattcatacagatacgatggaactaataatcaagaatcaacaggagcaaataaaagggcttctggagacaaatcgtacccttgtagaatcaaatcagaaacttatggaacagacgggagaactgcagcaaaaagtacaggaactcctgtcgcaagtagcctggttaaacagacagcttttcggcagaaagagtgaaaagctggcatccttggatcccaaccagcttgccttgtttgataccttggttaatcccaggcaagaggaaacggatcttgtggagactggcgtaggcaccgggacatgtaaaccggatggaaagaaaaaagaatcccgccgtaatcgggaactgttagaggggctgcccgttgtggaagtcattgtcgaacctgataatgtggatctgaatcggtatcgtcgtataggtgaagagcgcacacgtacgcttgaatttgaaccgggaaagctatatgtcaaagagacagtacgtcccaaatacggactcaaaaataatttaagtcttcccaaagagggtgaaagcggtgtcataatagcaccgcttccaccttcccctatatacaaatgtctggcaggaccttccttgctagccgaaatacttctgcagaaatatgaataccatgttcccttttaccgtcaggtaaaggaatacagacatttgggtgtacgactgccggaaagtactttaagcgggtggtttaagccggtatgtgagttattaagtcctctttattcggaattagtaaagctcgtaacgggcagtggatatgttcaggtcgacgaaaccacagtacgggtcatcaacaaaggaaagggaaaaaccgataaggagtatttatggatggtcagggcagttatggaaagactggtcatcttccattatgatgacggttcccgatccggacagacaatcagaaatttattaaaggacttcaagggatatcttcaaagtgacggttacagtgcctacaatgcgtttgagggcactaaggatgtgtgccttattgcctgtctggcccatatcagaagacatatggagttggcactggatgaaaatagatcacttgctgaatatgctcttaaacaaatacaggaactatatcatattgaacagatagcagatgcccgaaagctcgatgcgcagggacgatgtgcactccgccagcgtttagcaactcccatacttgactcctttgaaaaatggatggaacagacttatggaaaagtaccaccaagaagtcgcatgggacaagctattacctatacttatcctctttggccaagaatgaagaattacctgaaagatggaaatctgaaaatcgataataatctggcggagaatgcgattagaccacttactttgtccagaaagaacttcctcttttgtggtaaccacgaggcagctgaaaatacagcaatcatatgctcactattagctacctgtaaagcacaggaaattaacccaagggaatggctgaatgatgtcatagccaaacttccatactatctggaaaaggactccgggaaaaatgttcgtgaacttcttccggatgtttggaagttagagaaagccaacacgaatccaattggagtttaaatatttatgttgaagaataaaaaaactcgatattagcttttgactaaagttgatatcgagttttctattttatgaaaatacaatgtgtactttatcggatgcttacaatatataatatgtggcaaaatatcattaatagttggcaattgtggaagaaaagaaagcgagaagagaatcaataaagcagatacttctttctcgtctcccgataagcctgtaattcttttttccaactatttcgaatagtttcttcagattctcctctgagaatagctttgcgcaccgtgtcggttcccataagtaaatcaaaccatcggggtcgggaaaagaatccggccccttcatctgatatttgataaaaacgtaggaagtagtaaagggtaaaaccactaatattcgcgttgttccgtaagtcttctccataacaagctattccttgatgtaatggattcttgtcgaatccgggcagggaacgaggagtgaaaacgaaactgccatattttttattgggtgcacctaatacctgaaagggaaaggttgttccccgtcctacgctgatgtgggttgcctcaaaaggacaaagtgatgcatacaaacgaatagactggtcattgggcagattaggagaaggtttaatcggaagcgaatagggttctccatgtttccagcctgtcattggaattacttttaataagcaggcgttttttttgttggcaatccatccttctccgtttatcatttgtgccagctcgcctatggtacatccatgaagtataggaatgggaagcataccaacaaaactctgatagggggatttgagtatcggaccgtctatatagtcacacgggttaggccgatccagtacgagcatttcctttctgttttctgcacaagcctccatgacatagtacattgtactgatgtaggtataaaagcgtgctcctacatcttggatatcaaacaagatgacatcaatgtcttttaattgaccagcggtaggcttcttattattgccataaagtgaaataatagggataccggtgcgtaggtcctttccatcctttactgtttcgcccgcatccgtattgccacgaaaaccgtgttcaggggcgaatactttcactatttttatatccaactttaataaggtgtcgagcagatgagtctgttctattcctacaatagaagtgtgattgactaccattccgacacgtttgccttgaataagtgataagtattgtgcgatatgttctgcaccggttgttatcttactgtgggtatatcctgaaggggatatagcgagtagaaaaaaaagaatgagcaaagttctagcttgcatgtcggtatttttttgtaatattgcacaaaaatattaatttctcatcaagagaacaaaaaaacgacacatgaatccatacgaaatcattgataagtattatccggagaatacggaacagcgacaaatcttagtaatacacagcctttcagtgtcaggaaaggctatgaagatgctagatgcacatccggagttgcatttgaaccggagctttgtgaaagaggccgctcttttgcatgatatcggtatctttcagacagatgctccgtccattcgatgtttcggtactcatccttatattgctcatggatatttaggagctgaaattttgcgtgctgaaggttttcctcaacatgcgttagtttgcgaacgccatacaggagccggtctttccttgcaggatattattgatcagcaacttccggtacctcaccgtgagatgcttcctgtcacattggaagagcaattgatttgttttgcggataagttcttttctaagactcatttggatgaggaaaagacggtggagaaagcacgtaatagtattgcaaaatatggtgaagaagggctaaaccgttttgacagatggtgctctctctttttatagcactaaaaaataattaaataacggagattctaactcataattggtgaagtttgtgtacttttgccacttcaagcgtaaactattagttaatggcgccattgaaagcaagaatacttatatcatttatactgctgattgtcttactgatgcttcccgatgaggctacgtctcaacgtcgaaggagaggaatgattacctccaatactgcacaaaaagattcactacaaggaagcgattcgttgaaggcagatacggttacggtacgcattgattctatagcacctgttaagaagaagcaaccgctcgatgcaccggttgtttatgaatccaacgactccactgtttttacattgggaggatcggccacactttatggtagtggaaaagtgaactaccagaatatagagttagctgcggaggttatctcgatgaatcttgacagcagtacggttcatgcatacggtattaaagattctaccggagtggagaaaggtaaaccggtcttcaaggaaggggatacttcttatgatacggagactatccgctataatttcaaaactaaaaaagccgggattaccgatattgtcactcagcaaggtgaaggttatgtgaccggaagcaaagctaagaaaggggccaatgatgaaatctttatggaacacggtcgctatacaacttgcgatcatcatgatcatcctcacttctatatgcagctgactcgtgcaaaagtgcgtcctaaaaagaatgtggtgacaggacctgcttatctggtagtggaagatgttcctttgccattggctgtaccgtttttcttttttccgttctctagtagttattcatccggttttataatgccgacttacatggacgactccagccgtggtttcggtttggctaacggaggatattattttgctatcagtgatattatggatttgaagatgacgggagatatctttacaaaaggttcatggaggctttccgggttgacaaactataataaacgctataaatattccgggacgttgcaggcggattatcaggtcaccaaaacgggtgacaaggggatgccggactatgcggtatctaaagactttaaaattgtctggaatcatcgtcaagacgctaaagccagtccgaacagtactttctcggccagtgtaaatttctcgaccagtagttacgaacgttctaatatcaacaacctctacaactctcagttgctgactcagaatacgaaaacatcaagtatcagttattcacgtagttttcccgatatcggcctgacgctttccgggacgaccaatatcgctcagacaatgcgtgattcttctattgcggtaaccttgcccgaccttaatattacattgagccgtctgtttccattcaaacgtaagaaggctgcgggagccgaacgttggtatgaaaagatatccattagttataccggacgtctgacaaacagtattcgtacaaaggatgaccgtttgtttaaagcagggctgagcgagtgggaaaatgcaatgaatcataatattcctatcagtgctacttttacattgttcaagtatttgcaggtttctccttcagtcaattatacggaacgttggtatacccgtaaaattaatcagcagtataatgaagtggatcacagattggagtcgttgccgggtgatacgttgaacggtttctaccgagtgtctaactattcggcaagtttgagcctgagcacgaagctttatggtatgtataaacctcttttcgcaaagaagaaagaaatacaaatccgccacgtatttactccgcaagtgagtttgagcggtgctccgggattcagtaaatattgggaggaatacacagactataatggtaacacgcaatattattcacctttcactggacagccttacggtgtgccttcgcgtgaaggttcgggtacggttagtttctctatttccaataatctggaaatgaagtattatgatgcaaagaaagatacactgaaaaaggtgagcttaatcgatgaatttggagcgagtatgtcttataatatggcagccaaagaacggccatggagtgatttgagtatgactctccgtttgaaactgaccaagaattatacgttcaatatgaatgcgtcattcgctacttatgcctacacgttcgataaaaatggtaatgtggttaccggcaatcgtacagaatggtcttatgggcgtttcggacgttttcaaggctatggatcttcttttaattatactttcaacaacgatacctggaagaaatggttcggaccgaaagaggaacaggggaaggataagaaaaaaggagacgaggaggatgaagattcagacgggagcgatgaagaagaggctacaactaagaaagtagagaaagccgcggctgatgcggatggttatcaagtgtttaaaatgccgtggtcattaagtcttagttactcatttaatattcgtgaggatagatcgaagccgattaatcgtcattcaatgagatatccttatacctacacacataatatcaatgcgaatggaaatgtgaagatctccaataattggtcgctctcattcaattccggttatgattttcaggcaaaagaaattacgcaaacctcttgtactatcacacgtgatttgcattgtttcaacttgtctgccagtctttcgcctttcggacgttggaaatactacaatgtgacaatccgtgcgaacgcaagtatcttgcaagacttgaagtatgagcagagaagccagactcagagtaatattcaatggtactaaaataggtgaatatataaaaaatggcggcatttattacgaaagaaaaatgccgccactttttagggatattcctgaaataggaaaatttaaggcaactaattcattgcgagttagttgccttttttgtatctttaagcattccccccaaaaaacggtttgacggccaaaacgggggtaatctaaaataaaaacacatggtaaagatacaaaaaatctcagaaatcgaacctcgtttaggttttaccgagttcgatatgctaaaaaaatatcgtcaaagttttgcaacgagtgaattaggtcgcctccatgctctgtttcctttctcggaactggcccgacaaatgcatttgaagtcctctgctttgggtcgtaaaagttatttttctcccgaaggtaaaatagccttgatggtcttgaagtcctataccaacttttccgatgcacaactgattgagcatttaaacggtaatattcattaccagttgttttgtggtgttcagattgatccgcttcatccactaaccaatcctaaaatcgttagtgcaattcgtcaggaactagcggatcgccttgacgttgagtccctccagctcattcttgccgagcattggaaaccttatcttgagaaccttcatgtctgtatgaccgatgccacctgttatgaaagtcatctgcgttttcctactgataccaaactcttatgggaaggtattgtatggcttcatcgtcatctgtgcaaacattgccagaccttgcacatacaacgtccccgtaacaagtatcttgatgtacgccgtgcctatcttgcttatagcaaactgcgtaaacgcaggaaatcacagactcgtatgattacacgaaggttacttcagttattggaaaagttacttgaccagctggagcagcttcattcatcctacaggaacaggcttgcactatcctctgattaccaaagacgtttctcggtcatacagacagtccttgagcaagggaagaatttatttgcaggcaaaaaagtgtccaaccgtatcgtgagtatcgaccggcattaccttcgccccattatcagaggcaaggaaaccaaatccgttgaattcggagccaaagtcaacaatatacagatagacggaatctcctttatagaacatatctcctttaaggcttttaacgaaggagtacgtttgaaagactgtattcatctgcaacaacaactgaccggggttagggttaaggcgcttgcggcggattcaatctatgccaataatgccaaccggaaattttgtacaaaatatcatataagcacttcctttaagcgtaagggcagagctgccaaagatgagccgcttcggagaatcttacggtcggaactcagccgtgaaagagctacccgcctggaaggaagttttggaacgcagaaacaacattactcactggccaggataaaagctagaaacaggaaaacggaagtactttggattttctttgggatacatacagccaatgcggtatgtatgatagaaaaggtcgaaaagaaaaaaagaaaggcagcataatctgactaaaataacaggaaaaacaggagaggttttaacttcccctaaaaaagacatgtacataatgcatgggtgggaaggaaaaaacaagaatatgtaaacaatattctacaaaaaagatagaagactgggagagttgaatgaaaaaatcaagagaaaagctcacgtaaagcaaagcttttctcttgattttttagaaagaggaacatttactgaatatccctttttatatattattgcaaactttctaccagataatttctgtttttccgtgtgccttcaaataatcgtttgcccggctgaaatgtttgttgccgaaaaaaccattgtaagcagaaaggggagaggggtgtgctgatgtgagtactaaatgtctgttgcggtcgataaaagcccctttcttttgtgcgtatgatccccacaagataaatacgatattttctctattttctgctaacgtgcggatggctgcgtcagtaaagacttcccatccccgattttggtgtgaaccggcttgatgagcccgcacagttagggtagcgttgaggagcagaactccttgctcggcccaacgtgttaagttacccgtaacaggtgcatcggtaccaagatccgctttaatctctttgaagatatttaccaatgaaggagggaaaggaactccgtcatttacggaaaagcagaggccatgtgcttgaccgggaccatgataaggatcttgccctataattacaactttcactttgtcgaaaggacaaaggttgaaagcattgaaaatcagtcttcccggaggaaatatctgatattgactatattcgtttctgacgaaatctgttaatgtccgaaagtagtctttgtcgaattcaggtgctaaatgtgctttccagctttcttcaatttgtacgttcatgataattatataaggtgaatttctagttcttcgcattccttgcgcatatcttcaggccaaatactggcttgtatctctccgatatgggctttacgaaggtaaaacatacacaagcgagattgaccgatacctccaccgatggataatggaagtgtgtcgttcatcaaacgtttatggaaataaagttccagtcttttctcttctttttcttctcttaattgtcgttgtagagcctccttgtctacacgtatacccattgatgataattcgatggaacgttgcagtacgtcgtcccacagaagaaggtcaccgtttaatccgggtaaattattcagtccggttgttgtataatcatcgtaatccggcgcgcgtccgtcatgttttttaccatcactcaatttgcatcctataccaatgatgaatacagcaccatatttttggcagatggcatgctcacggcatttaggttccaagttaggatagagttggcgtaactcctctgaatgaataaaatgcagcttttgtggcaaacaaggtttaatttggggatacatttcgtataccatatattcggtgcgaatcatggccgcataaatacggtttacgatttcttttaggaagtgtatgtttctgtcttcatcggtgataacgcgttcccagtcccattgatccacatatagagaatgtagattacccagttcttcatccgagcgaatagcattcatatccgtataaatgccatatcccggttcaatgtggtaatcagctaaagttagtcttttccatttggccaatgaatgaaccacttctgcctgtgcgtctcccaagtctttgatggggaaagagacaggacgttcaattccatttaagtcatcattgatacccattccttttaatacaaacaagggggctgttacacgtctgagacgtaattcggatgataagtttaattggaagaactcttttatttgtttaattcccagctcggtctgtttgaggtcgagtagtggtttatagttcttaggttttatcaagtaactcatagatttgttgaatgttaattgtcggcaaagataggaataaaattgatatatgtaatggtaaatctctaaaagattgtcaaattgataaagtatatgctctaaatcatttcaaaataacaaactcttaataagatggattgccttaagaactataaaaaaaggagaaacattaggaagatgagaagattttttatacttttgcttcgcattttaaaaaatggccccgtagcttagtgaatagagcgtcagattccggttctgaaggtcgtgcgtttgaatcgcaccggggtcacgaagaaatcccttgataatcagttgattgttgaggggtttcttttttaggtgactattattttaaagtcaaaattggactaaatcttgtctaatatgtcttattgttgatctattgttgaccttaaattcatatttaatcgtaaactccgaagactgaatttacttctctttcatattgatttcatacctcttctttcatgaatcgataccatcttttactttaatcttttactttatacttgcataatttaatccgaattatacaaataagttgtttaatgtaatcgatatttccgtataaaatattatttttgcaatgatgataatttgtattaaccctagattttgcttattatggaagaagctggaaaaaagaaatggtctagtattgtgttgattgttggagctatcatctttatcgttcttttaatttattttacagtaatctcaagtattaatctgtaaacgaaccaattatgagaattgaaatttagagcctggacatgacggatgattcctatgtccaggctttaatttgagattttaacttcttgaaatctgaagtcctttatcggaaagagacatttctacaaagcgggcacgtggatttggagcctcttcagtcagaatccgacgaatcagtcctgcggcttgtggatctttggctaccatatacagatagccaccaccacctgcacccggcagtttatatcctaacgtataatctttgatcttttcgataatggcagctactgccggtggatttgttccacaatccaatgcttggttctgtatccaagttttgcccaccagattgccgaaattagtgaaattactacggaggatagcttcgctcatatccatagtgtgtgctttcatttccgccaatagactcagatgtgtgcctgaattaaggaacatggaactgactatttctgccagaatccctttggctgtgcgggtgattcctgtgtaatataataagtggcagtcacgatagtcgggatgaacaaatagctggtcgggcagccatcgtaccaatggattttgttcgaaacctgcttcggattgaagcagcttgacgccagagaagacaccgccgtattgatcctgccatccgcctcctgtggtcaataactgttccaatacaagtgtataactgcaaatttcgtttttatcccaagccagtccgcagaagtcattgattgctccgagtacggtagaagccaaaatagaacttgttcccaaacctgaaccggcaggaatagctgctaataatgttatttcgaggcccgaaccaaaagctttcaattgctcttccagtgaggtgtaacgttcggcagagaatgcaggagcaaaacctgccaaagtaagagcggctttggggatagaaaacggagaacctacttttttgtagtcttgcagttcatcataattacttatgacctccatagctcccatatctatagaacgaagaacaatgtggaattccttgcacggttttatatatacctgcaagggtggctgaccgtttaattcaatggcgagattgacaacacttcctcccgaataaagagaataaggaggtgtatccgtccatcctcctgccatgtcaattcggacagggctacgtccccatacgatttgatcggaataaacgctgagtgccggatgattttttcgtgcggacattgctcctagtaaaccatcgcggagaagttggaaagctgcttgttcttctttctgccattcgccgtttccacgtaatttcataatccgtgcacggagcattcggttatgtatccgtaccatcggagccgcatcttctttcagaatgtcgggagtttccaagtctaaatgtacaaactcgttggcagcatcctgtaaatcgagctgatagaaaacactcttctcataattggctgccaagcctttccaattttcacatcgataattgcgacgttgggtgtaaagacgtttgagattggcatttgccgagatttcatcagcagaaactttcacggatttcttccaaagttctttccctttttctaattgtggttccgatgtcatccaccggagtactattcccaattcctcaatggaattggttcttgggaagatagcggccgattgtaaatcatccgtccggccttcgattgcttcccagtcaagtcctctttcttgcatccactgtgaaaaagggatattgagatacatagtcgtttcattgttcagggcccccttgaatatgtcatccaacccgtacgggcgtgctatgaaatcatattctccgatagggatgatatcgatgcagacattgtcaggaatagttatattccaatggttttccggaactcccgttatgatttggcgagatcccagtttccattcttttcccacatagctgttttcgatccacaaattagcattgttggcggaaagagatacctgtgtgatggaattctgaatgaaaatagccggattcggttttactttacgatgcatgattttccgttggtcgcgtaccttatcttgtatggacaaagtagaagatatcaattcgtgacttgtgccgtaatgataaaattctccaccgggcagtggcaggattgctaccgataagcggttgatttcttcatctttcgttttagggtgttttcccaaagccagtccgtagtccgaatataaatcataatagttaatatcgctcgttccactttttaatgaccgtttcattaatacttcaatggcacggtcacttaaaatccagataccgatatccatcaagaagagatgtgtcttcgacagcctttccaagtcttcaagagaaggtttctgtaacatgaaatcgagaatctccggactttcccgattagaaacaaacacaccgtgatgtgttgctaatgaaggatttacccataaaccgtaacataccacgtctacattcggaatgtcttgcagtggcttttccgaacggatatatacatcgccgctcgctatcaaagtattcagcccgtcgggagcttgtttcatgattctttcatatagcggcagttgcagcgacagcaggttctgtcctagcttttgtccccgttcccaactgaagattgggatcggagtcagtatcttgccggaaggaccataacttggcagacgacggctttgtccgcccgcatggagtaatattcttttctctcgtcctatccaatcactgaaaggaacttgtggagcaaattcctgatgacaggcttgcagtagccatgtggttccaccaccggagcctagtttgcttccaacaggatcagatgtgcaaaaccaatcggtacgatttacttcttccagttcatgaaagcaatgaattaaatttttgggtaaagacaataacttttgcatagtggaattggagttaacttagatagaatctaggtgaattaagcagttgtcccattcattgcataaggcttgcatggaaggaaacaataaatcagctccggaatccagcagaacctgaccatctaacggacctgtattaacagcgatagtgaatataccagctttatgtccggcttccactcctaaaggagcgttttctataactacggcttcatcggctttcagtccgccttttttaagagccatcaaataaggttccggatttggtttcccatatttcacatcaaaagctgttaccatcagttctttatgaaacattccgggaaagttgtgttccagccgttcgagcaaagacaactgtccggagcctgtcactaccataggaaccagtccttcattttttattttttgcagcaactcccatgcgccgggcatctgctcggcttctgtgtaagaattgaataagacactcttctcttgatagatactttctatttcttcctgtgttgcctccctacccaattcgcgttggaatacaatattgatagtagcggctcccgttcgtccttcgtgcatataagcttcttcgcgactaagagtaagtccatgcgatttcattacattatgccaagcttcagagtggtaaggcatagagttaaagagcacaccgtccatatcgaataggacagcttttatctttttctgagacatatctaaatacctattaattagttttgaagcacaaagttacacattttttgctatttagaagataatatgtatttttgtagcattataaaattagacgatagcatgaaaaagagagtattattactgctaccattgtttctaggcgcctgctccgatggtggggagagtcctatcattaaaatagagaagctatctgttaaggttgattctgacaataatagcgttgaaggagaagactatgccaataagatggataatttgccgactctgaaagtgggggatgaggtggaagctcttttacttttggacggtaacggagctgaattaaaaacattcaaacttcagaatgatgaagaattggctactaagcttatttataaagaggaggaagtttcgactgagggaaatctgacggatgaagataaagggcaactgcgtttcaaagacggcgtgacacaaagtcaggttatagttcgagccaccatcgaacatgttgatgagaacggtgacgtgaaattggaattttatctttcctccaaagctgagtgtgaaggagctgaagaagtcatcggactgaaaacaacgaatgaaaaagaaaattgatagctgattgcagtttattggtttaaacgcagaattaacgcagattctcgcagatcagacttctttataagaaggtttctttgcgaaaatctgcgttaattttgcatttaaataatattacttagggatattcctaaaataataaaatttaaggcaactacttcattgcgaattagttgccttttttgtatctttaagcattccccccccaaaaacggtttgacggccaaaacgggggtaatctaaaataaaaacacatggtaaagatacaaaaaatctcagaaatcgaaccttgtttaggttttaccgagttcgatatgcttaaaaaatatcgtcaaagttttgcaacgagtgaattaggtcgactccattctctattccctttctcggaactggcccgacaaatgcatttgaagtcctctgctttggggcgtaaaagttatttttctcccgaaggtaaaatagccttgatggtcttgaagtcctataccaacttttccgatgcacaactgattgagcatttaaacggtaatattcattaccagttgttttgtggtgttcagattgatccgcttcatccactgaccaatcctaaaatcgttagtgcaattcgtcaggaactagcggatcgccttgacgttgagtccctccagttcattcttgccgagcattggaaaccttatcttgagaaccttcatgtctgtatgaccgatgccacctgttatgaaagtcatctgcgttttcctactgataccaaactcttatgggaaggtattgtatggcttcatcgtcatctgtgcaaacattgccagaccttgcacatacaacgtccccgtaacaagtatcttgatgtacgccgtgcctatcttgcttatagcaaactgcgtaaacgcaggaaatcacagactcgtatgattacacgaaggttacttcagttattggaaaagttacttgaccagctggagcaacttcattcatcctacaggaacaggcttgcactatcctctgattaccaaagacgtttctcggtcatacagacagtccttgagcaagggaagaatttatttgcaggcaaaaaagtgtccaaccgtatcgtgagtatcgaccggcattaccttcgccccattatcagaggcaaggaaaccaaatccgttgaattcggagccaaagtcaacaatatacagatagacggaatctcctttatagaacatatctcctttaaggcttttaacgaaggagtacgtttgaaagactgtattcatctgcaacaacaactgaccggggttagggttaaggcgcttgcggcggattcaatctatgccaataatgccaaccggaaattttgtacaaaatatcatataagtacttcctttaagcgtaagggcagagctgccaaagatgagccgcttcggaaaatcttacggtcggaactcagccgtgaaagagctacccgcctggaaggaagttttggaacgcagaaacaacattactcactggccaggataaaagctagaaacaggaaaacggaagtactttggattttctttgggatacatacagccaatgcggtatgtatgatagaaaaggtcgaaaagaaaaaaagaaaggcagcataatctgactaaaataacaggaaaaacaggagaggttttaacttcccctaaaaaagacatgtacataatgcatgggtgggaaggaaaaaacaagaatatgtaaacaatattctacaaaaaagatagaagactgggagagttgaacgaaaaaatcaagagaaaagctcacgtaaagcaaagcttttctcttgattttttagaaagaggaacatttactgaatatccctacttacagtcttgcctgaatcgctttagattcttcttcataacccggcttgttcagtaaagcaaacatattctttttgtatgcttccacacctggctggttgaaagggttgacgcccagcagatagccactgataccacaagccttttcaaagaaataaagcagaccgccgatattgtactcggtcagttccggaagaacgatacgcatattaggtacaccgccatcaacatgagccaattgagtacccaattccgccattttgtttacttcatccacgcgcttgccggctaagaagttcaagccatccagatttgcttcgtcagaaggaacttccagtttatgatttactttctctaccgagattacagtttcgaagatagaacgttcaccttcctgaatccattgacccatagagtgaaggtcagttgaaaaatccaccgatgcagggaaaatacctttgttatcttttccttcagattccccgtaaagttgtttccaccattcgctcacatagtgtagtttcgggcagaagttaacgagaatttcaatcttcttgccatttctgtataactcgttacgggtcgcggcatagatagcggcaggattttcagcaaaagcaacgtcagagccacataccttttccatatcggcagcaccggcaaccagtttctcaatgtcgaatccagcaactgcaatcggcagtaaacctaccggagtcagtacagaaaaacgtccgcccacgttatcggggatgatgaacgttttatatccttccttgtcggctgtgacacgggcagcacccttttttgcgtccgtaacggcaacgattactttcttggcagtttctttaccgcgttggtcttcacattgttttttcagcaaacggaaagcgagtgctgtttcagttgtagttcctgatttggagatattgatgacaccgaacttcttgtctttcagatattcagtgagttcatacaaataatcttcactgatattatgtccggcataaatcatgatcggatcagccttcttattctgcagccaggtaaagctgttggacagagcctcgatgacggcacgtgctcccaagtagctaccaccgataccggcaacgattactacctcgcagttatctctcaaaacctttgcagtagcattcaagtcagccaggtgttctttagtgatagaagaaggcaagtgcaaccatcctaaaaagtcattacctttgcctgttcctttttcaagcatttcctgtgcggctttaacctcagcttcgtaagcagaaactttttctttggagataaatccaaatgtcttttcaatgttcaagtttatcatatcgtttttgtttataaggttatctaaaagaatcagttaataatttaatctcgatcgtgggcgagatacgctcgtacaggatgttgtaaacagcgtccaatatgggcatattgacatgatgatgtttgttgatttccttgatacacttcgtaccatagtaaccttccgcaatcatttccatttcaatctgtgcactcttcacggaatatcctttgcctatcatcgtgccgaatgtacggttacggctgaaattggaataaccggtcaccagcaagtcccccagataaacagattcatctacgtttctgttcaacgggtgtaccgtgtttagaaaacggttcatttcctgtatggcgttggaaatcaacacagcttgaaagttgtcaccatatttcaacccgctacaaataccggcagcaatggcatatacatttttcagcaccgaactgtattcgatacccgaaacgtcgtcgctgaccgaagttttgataaaactgcttcccaatctgcgcgcaaaaatacgtgccttatccttgtcgggacaagcgatggttagataagaaagacgttccaaagccacttcttccgcatggcagggacctgccagcacagcgatgttttcaggtggtacgccatattccttagtgaagtattcggacacgataacattgtcgtcgggtacgattcctttgatagcggtaatgataaatttatctttaatcttggttttcagctttttcaagtgtgccttcagataaggggagggagtgacgaagattagtgtatccgattctttcacaatatcgttgatattggaactgaaagagatacgtttggtatcgaatttcactcctgttagataggccggattatgccctaatctcttgaaatctgcgatgcggtcatcgcgtcgcatataccaattgatagagtcttcttgggccagacacatctttgcgatggctgtagcccaacttcctccgcccattatcgctatcttgccgggtaatttcatttctaattgaaagttgaaagttgaaagttgaaagttaagacttgaaaatgttattcagataacaactttcaactcttaactttcaactctcaacttatttaagtttgttaatccactcagttacgtcgtttaccgacggattggtaagctctaatttatattttttgttgataccacagatgtcctggtgcaacttctgcggattgacatctttcatgtcagctacagtgttgtaaccggctttctggataaccggaacccagtcttctgcgattcccaattccatatatttagcggcagcgtcttttttcactactttttccgggcgcatttgcgggaagaataatacttcctgaatagtggtctgtccggtcattaacattaccaagcggtcgataccgataccgatacccgatgtaggaggcataccatattgtaaagcacgcaagaagtcctgatcgataatcatcgcttcgtcgtctcccttgtcggccaaacgcatctgctctttgaaacgttcttcctgatccaacgggtcattcaattccgagtaagcattagccagctctttaccgttcaccattaactcgaaacgttcggtcagtcccggtttagaacgatgcatcttggtcagcggagacatttcaaccggataatcggtgatgaaagtcggctggatatacgtaccttcgcagaattctccgaagatttcatcaatcagcttgcctttacccattgtctcgtcgatttcctccattttcagttccttgcaaacttggcggatttcctcttcgctcttgccgttcaggtcatatcctgttttttctttgatagcatccaggataggcaggcggcggtaaggagctttgaaactgatcgtttttccgtcgacaacgctttccgtacagccgtttacagcgatacagatacgttccagcagtttttcggtgaaattcatcatccagttgtaatccttgtactgaacataaagttccatacaggtaaattccggattgtgagttttatccatgccctcgttacggaagttcttacctatttcatatacaccttcaaaaccacctacgatcagtcgcttcagataaagctccgttgcgatgcgcaggtaaaggtctatatccagtgagttatggtgagtgatgaacgggcgtgcactagctccaccggcaatagattgcaggataggagtttccacttccgtgtaaccagcctcatccaaaacgttgcgcaatgtttttactacagtggcgcgtttcaggaatgtttctttgataccgtcgtttactaccaggtccacatagcgttggcgataacggagttcgggatcttcaaaagagtcgtaagctactccgtctttgtatttaacgattggcaacggtttgatagactttgcaagtacagtcagtttctttgcatggatactaatttcacccatttgtgtgcggaacacgaaaccttcgataccgataaagtcacctaagtcgagcaggcgtttaaatacagcgttgtacagttccttgtcttctcccggacagatatcatcgcgggtgatgtacacctggatgcgacctttagagtcctgcaattcgatgaaagatgctttacccatcacgcggcggctcatgatacggccggctacggaaacctggcgtggctcttcgtcgtctttaaattcagctttaatatctgtagagaaagcattggttacatactctgctgcagggtacggatcaatacccatcgcacgaagctcattcaggctgttgcgtcgaatgatttcctgttcacttagttctaatatattcatttcgttacgtattaactcaattttggaggcaaaaatacgaaacttttctcatatatcctgtaatccacctcttttttgtatctttgccgtctcaaactaataggtatgacaggacaaaagacacccactgcgttgggtacggaaaagattgggaagcttttaatgcagtatgccattccggcaattatcgccatgacggcgtcttctctttacaatatggtagatagtatttttatcggtcacggggtaggtgcgatggctatttccgggttggcattaactttcccgctaatgaatcttgccgcggctttcggctcgttggtcggtgtcggtgcggctacattgatttcggtgaagctaggacagaaagattatgataccgcacagcgggttttgggaaatgtgtttgtattaaaccttattataggtatctcttttacggtaatcgttcttccttttctcgatccgatactttactttttcggaggaagcgatgaaacggtgaagtatgcccgtgaatttatgcaggttatcttgctcggaaatgtggttacccatttatatctggggctgaatgcagtgctccgtgcttcgggccatccgcagaaagcgatgatggcaacaataacgacagtgataatcaatgtattgcttgctccattgtttatttttgtattcgactggggaatccgtggggcggctacggctacggtttgtgcgcagttgattgcattggtctggcagcttcatctgttctgccgcaaagatgaactgatacggttgaaaaaggggatttttcgtttgaaacggaaaatcgtgttggattcgctggctattggtatgtctccctttctgatgaatatggcgtcttgctttattgtgattctgattaatcagggattaaaagagcatggaggtgatttggcgatcggtgcattcggtattgttaatcgtattgtttttgtctttattatgattgtattgggactaaaccaagggatgcagcccattgcgggatataattttggtgcgaagctctatcttcgtgtgacggaagtactgaaagtaaccatttgttgtgcaactgtagtgacaacgattggtttcctgatcggtatgtttattccggaaatcgtatcttccatctttacttcggacgaagagttaatcagcattgcttctaaaggttttcgtattgtggtatttttctacccgattgttgggtttcagatggtagcttccaacttcttccagagtatcggaatggcaagtaaagccattttcttgtcgttgacgcggcagatgttatttctcgttccctgtttattgattctacctcactattatggacaaatgggcgtttgggccagtatgcctgtggcagatttggcggctagtcttatatccggaggaatgttgtggtggcagttccggcagtttaagaaagttactgtttgataagtttgttccgatattctttaggagatataccgacatactgcttgaaatatttcccgaagaatgattgtgtggggaagttgagtttggttgctatttccttaatacttaaatcggtattatcgagcagatatttagcttctgtaatgacattctgtatgatccactgcaaagcactgctccctgatttctccttgatgacagaagaaaaatatcgggcggacaagcattgcttgtctgcataaaaagtaacatcacgttcctgacgataatatcgataaagggtaatcatgaaattttggaagattttatcctttttatcctgtggcagtggtgtttggggttcgttactgaaataaatgtttaataactcatagcatatcacctgtccccaggatttgattaattcagaaattaaatgttgtttctgacgggaactgttacagatattctccctgttaattcgtttttctacagatttgagcaagttctctacaaatgtatattgctcttcggaaagcgacagacagggattttcccgcaaataaagcaagttttccgagttggctactttgtttactattggtatgacataatccaggtcgacctctatcatgattccttcgaggtcagcgctcctttggcgtatttgtagaagattggcagctgtatatataaaaagattccttttgttaatctgatatggtctacctcccaacaggatttccgcctgtcctttctggcagaggaaaagtccgcattggttgaattcggaaataatgcatccttctttcatggaagtatcctccggagatattataacatacttgaatggcatcagtggttccatattccttttttgttgaaatgaatttctttacaaagtaacaaacaaataaatacaaatagcaaactatttcggctttttatcttaggtaacgtacaaatagaacaatgtttcgtctaaatcaacctttctcctcatgtttgcttgggatacttttgtggcaactaactaataagtgaaaatatgagacgattggacttcttattaacaggatttttagcagttctgttgacttcgtgtgggcaacgtgtacaaaacacagacagtaagccgacagtgaagattgataccgtactttctgccgacagacaaatagctttgcagtttccgggacgggtgaaagcggcacaggacataagtctgtctttccgggtgagtggtactattcagtatatgcatgtaaatgacggtgcctatgtgcgtaaagggcaattactggcagaattagatccgacagactatcagattcagctggatgcggcagaagcagaatatcaaagtgtgaaagcggaggcggaacgggtgatggcactttataaggaaaatgtgacaacaccggatgctaacgataaggccgtgtacggattgagacagattaccgccaaatataaccatgctaaagaccagttggcatacacccgtttgtatgctccttttaacggatatgtgcagaaacgtctttttgattcccatgagacggtagctgccggtatgcccgtcgtttccatcatcagtgagggaagcccggaggtggagattaatcttccggcagtggaatatattcgtcgacagcagtttacccgctactattgtacattcgatatttatcctcatcaaagatatgctttggaactgattagtgtcacccctaaggcaaatgccaatcagttgtacaccatgcggcttcaactgaaaaaagaagataaacaggcagttccatcgcccggcatgaatacaatggtaactatcgaatgtagtgaaggagatgtgtgtaacctgtcggttcccggtggagcgattcttcgtgagaacgggcgtacgagtatctttctttatgatgcttccagtcacgctattcgccgttgtgatgtgaccgtcacccgtctgcttagcgacggcagatgcctgattacttcagacggagcgaatcccggtgacttggttgtcgcttcgggggtacatcatgtaaaagagggagaacaggtggaaccgcttcttccggctactgaaaccaatgtgggaggactgctatgattgatattagtaaatgggcatttgagaacaagaagttgatctacttcctgattgccgtactgattgtaggaggagcttattccagttatgaaatgagtaaactggaagacccagaaataacggtaaagcttgccatggtagtcaccacctatcccggtgcgtctgcgcatcaggtagaattagaggtgacggatgtactggagaagaatattcgctccatggggaatatagataatgtggaaagttattcctacaacgatctctccctgattcaggtagaactgaaaacgactgtcaaagagacggacgtagaacaatgctgggatctgttgcgtcgtaaagtggcgaacgcacaggcagaacttcccgaaggtgccaatccttctattgtaaaagatgattttggaaatgtttacggaatgtttttcgctttgacgggtgacggactttccgatagggaactatctgattattcagaactggtgaaacgtgaagtcagtgaactggatggggtggagcgcgttgacttatacggtaaacgtcccgaatgtattaatatctctcttttgcaagaccggatggccaacttgggtgtgaaacccgccgaagtgctagccacattgaacggacagaaccaaactacttatactggttattatgataatggcgataatcgtatccgggtgacagtcagtgacaagtttaagacggtggaggatatcggtcgtatgctgattcagggacatgatgccgatcagttgcggttgagtgatatagcccgtattgagaaagattatgaagaccctacccgcaacgaattgttttatgaccgccagcgtgcgataggaatcatggtggctgcttctccggatgccgacattattaaagtggggcatcgagtggaaaagaaactggagcaactaaaggctgaacgccttccggcaggagtagagtgtcataaggttttctatcagccggaacgcgtaggcacttcgttggggacgttcattcttaatctgatagaatccgtgattatcgtagtcgttatcctgatgattgctatgggattcaagagcggggtgattatcggtatcagcctggtagtgacggtattcggttccttcctgttcctttattttatggatggtacgatgcagcgtgtttcattggcctcgttcgtgcttgcgatggggatgctggtggataacgcgattgttatcatcgacggtattttggtagatttgaaagccgggaagagccggatggaagcaatgactgctatcggacggcagacagcaatgcctttgctgggagctactctgattgccatcatcgcttttcttcctatctttatgtcgcctgatacggcaggcgtatatacgcgcgatttgtttatcgtactcgctgtttccctattgcttagctgggtgctggccttggtgcacgttccgttgatggccgaccggattttgcatccggaaatctctgcggcaactactgctgccggaaaacgtgtgtatgaaggaaagatttatgctgtgctccgttcattattgaaattcagtctggcacatcgttggagttttgtgtttacaatgattgctttggtattgctttcggctttcagttatcggtttatgaagcagggctttttcccggatatggtctacgatcagctttacatggaatataaattgccggaagggactaactccactcgtgtagcacatgacttggaagaaatcgaagtttacctgaaaaagcgtccggaagttacacacgtcactacttctatcggtggtacacctgcccgttataacttggtgcgtaacgtagccaatccttccttatcttacggtgaactgattatcgacttcacctctccggacgatttggtggataacatggcggaaattcaacaatatctttcacaacattatccggatgcttacgtaaagatgaaccgctacaatctgatgttcaaaaaatatcctattgaagcgcaatttaccggtcctgatcctgctgttttgcatcagttggcagacagtgcccgcaagattatggagaattgcccggatgtttacctgattaccacggactgggaactgcaaattccggtactgactattgaatatgaccagcctgcggcacgtgctatcggattgagccgtaatgatgtaagcctatctctactgaccgctaccagcggcatccctatcgggtctttctacgaaggtattcacaaagataatatctacttgcgttgcctggacgaacacggaaatccgattgaaaacctggacaatacgcaggtattctcgtctcttccttctctgaacggtttgctgacacaggaaatgatgatgaaactgaagacaggaacactatcaaaagaagaattggtggaaacgttgatgggaacaactccgttaaaacaaatcagtaagcggattgatgtgaagtgggaagatccggtggttccccgttataacgggcagcgtagccaacgggtgcaatgctcccctgttccgggggtagaaacggagaaggcgcggcaatccattgccgcgcagattgagcagattccgctgcctgacggatatcggcttcaatggcaaggcgagaggaacgccagcacaaagtctatgcaatatctgttcaagaatttcccgtttgctatcattctgatgatatccattctaatcatgctgttcaaagattaccggaaaccggttatcatcttctgtactattccgctggtatttgtcggtgttgttgctgtaatgctgcttaccgggaagacattcaactttgtggctatcgtcggtacattggggttgatcggtatgattattaagaacggtattgtcttgatggatgagatcactttgcaaattaatcagggagtagaacctgtgacggcattgatagacagttcgcaaagtcgtctccgtcccgtgatgatggcttcgctgactacgattttgggaatgattccattgttgccggatgccatgttcggttcgttggcggcttctatcatgggtgggttgctgttcggcacgttgataacgttgctttttatcccgattttgtatgcattattctttcatataaaaaagacagacaaatgaaaaaagaaattcttgtagtcattagtgtagcgggtgtattgttcggcctgtcggtttctcttgccgcgcaagaaaaactaagtctggcgcaatgccgtgaaatggcactgaaatataataaggatatggctgccgctaataagcagacggaagcagcccgattgatgtctcttagttataaagccaatttcttccctaattttacagtcaacggaacgggtatttatagcacagcggatggaagtctcggagttccgggaggaaaccttccggttttcctgcccaatcctgctaccggagaactggtatcgagcggtttcgcttattttcccggattgaatctggattataaggtcggaactgtttactcgggcggtatacaagtggagcaacctctttatatgggaggaaaaatccgtgccgcctataaaatgtcactactgggaaaagaaatggcacacttgaacgaagccttaactacttcggaagttattctgaatacagataaagcatacgtgcagttagtgaaagccaaggaaatgagaaaagtggcggaaaaatatcataacttactaacggaacttttcaaaaatgtgaagagtgctcaccgacatggcatgaaaccgcaaaatgatgtactgaaagtgcaggtgaagctcaacgagagtgaactttctttgcgaaaggctgataacgccctccgtcttgcgggtatgaatctctgtcattacatcggacgccctttgacagcacagattgatatatctgatgattttccggaagtggagcaggaatggaaagtgcaggtttctgatattaccgcccgtcccgaatatggaatcttgaacaaacaaatagccattgccgagcaggaagtaaagctgaatcgtagtgaactattgccgcgtatcggcgtcagaggtagttatgattatcttcacggattggaagtcaatgatgaaactttgatgaaaaagggtgctttttccgtattcctgaatgtctctgtccctctgtttcattttggcgaacgtaccaataaagtaaagtctgccaaagtgaagttggaacaagctcgtcttgaacaggaaaatgtcaatgaaaagatgttgctggagttgatgcaagctgccaataatctggatgaggcccggttggaaacggagctttccgaacgttcgctggaacaggcagaggagaatatgaaagtcagtggtaagcaatatgaagtgggactggaaactctttcggattatctggaagcacaagtgctttggcagcaggcttatcagacgaaagtggatgcccatttccaattgtatgtgaattatgtggcttatttgaaagcggcgggacaactgcaatgataaaaccagtattctggacatccttatggaatgtccagaatactggtgatgatttgtacctgtcggggagtaaaagttcgtgtacgcggatgataacctgtggcagtcaataaccggagcagttctttatttattttaatccatttggtgaatatgcgtatggcgcaacggggtgtaatgttcggattgtacatacaagccaattcctttttcttataagttttaatgcgaaacggaatttcttcctcttctgatggcaattctttcatgttgatattttaatgttttaagatgttgtaaagatacaaaataaaaaaggcgttgtcaagtcttttacaggaatactttgggaaacagtatccgcccgtaggcgggtactgttttcctgcttttaaaggctgatgattagtcttatgctgccgggtccggtgcttctcctttgccgtcatccgggtttggattcgggttgggatccggttgctccgggctgatggaaccatcatcggaagccaccgctttttgaacactgactttacttagcatctctttgaatttgtagcccggagtgaaaatgattttcactctgcgtatcgtatcgctatctacatctttttcagcatcctgactttcgcaattcatacctggacggaagcatccgaaatctcctaattgaacagagatgccttttctaaggttgagattcaatgtatcgatcaaagcatcgagtacaaattttaccgctccactgggaaccattcctactttagtgatttcctcgcacaaatctctgaaatccaccgtattggtgattacattttgtgctacatacttttcagctttagttttatcaaagccgaatgttctttttttaatgacgtatctaagtgccatagttttttgttttttttaattagttactttacttatcaattctctttgtgatcacgatgcaaagatactatgggcactttccggggaggtgctttaacgatcctagatgtacgtactttgattcacttttatttattttgtttgtatgattctgatttatagattcttagatgttctactttaatagccatttccaaatagggagtatttcaatcagtttcacgatactcaaatgttcttgataatcataaaatatgccgaaaaacgatgaacgttgcaagaataaacactatatttgtacatattacactaagataatagaggtatagtatgctacattcaagccaatcagcccccgttgttgatggcaaagtcatggagtttgtgatttttgccattgagagtgccgcccagaagttgggtattccggctcctactctctataaccgtttggaaaaactgaatcttatccgtcaatacctgataagtggatatgacatgcttcacacccagagtcgtgagtacatagccgatacgttggtagaagctcttgaaaactgggaagcccattataaagaaaaaggagaatctgtatgaaggtctatcatggtagtacgcaggccgtagagtatcctttggtcggtgtcggacgcgaaaacctcgactttggtaaaggattctcaatcaacgtctcattgacgagtgtctctctttcaaagaatatataacaataaaataacctgcgtttatgatagatgtattagtatggaataaatacactcgtgtggtgatgcaattagcggagcgtttgaatatttctcccgaaaaagcattgcacttgttctataatagtaaggtatatgcattgcttcttaataaacaatatccgcttataacgttgagtgatgcctacatcactgatgaaatcatacttgagttacaacagcaataatcttgttgtggctcttaattctgtgttccaagagtttatacctttatatatacagtcaactttccaaccccttccttttggattattctgtcggtaataaaggaatttaattcttcaatagctacttttttatttcgtcctgtcagatggctataatctgtccggctgatgaataggtgattttccaaatatgtgttgaggcgctcgcgacacgtctcacgggagatactatttttcttagggcgtgtgatagattctcctcgttgcagcctcattttgtcgcctacttctttcttgaatggacgacttgcgcggaaattaatatttttcatttggacagacgctgcccgaatttcttttttatctttaaccggcggacattgcaacgatgtagagaagaatccgaagtttcccatttctacattccagccgtcggctagtaaatcccgtgcttcattggcaaaggcttccatggctcctgccaataaacttctgctgataccggtaaatttgtggacacgatccagaaactcttctttatctacggttcctttggagacaatacgggcatgtagcggttgtttctctccgtcaggtgacggtggattttcaaataagtcatataaagcactcatattctattattaatggattaattactactattaattcgttctaccaaggttattctttagttctaccttggttatcgtttggttcgaccatggtatttgtttagttctacctaggtggaacgaattgttatttgctacaaaagtaggtagtttatgtaagagagaggtgctttaattgtagagtggtttcttatttgaataagataacttcgttataacttgcacttcctgatttattcaattacttttgtagcgtataaacccaaagaaaggagttgtataagtatggcaagaccaattaaggaaactccgatacttttcggagaagatgctcggcgatttgaagaacggatgaaagagaagcgtagtgaaacgccggagcagcgggaaaaaaggttgaaagactatgaactggcaatgaaaatctttaaaaaataaaatacgaaccttttctttatcgggaagctttgttagctgtaagtaatgtacttgaaaataaaacgggttgtcgctttttaactgtagatgcgtatgcagcagctgttcctttttatgagaagaatggatttattcctttgaataatgaagatgtggattctgctacacgtttgctttattttgacttgaatgatattgtgaattagattagagcagctttattaaatattttgttttgtatacgaaacaaaatggtgtaccccttattttatatacgaaacaaaaaacttattgaaacctgcctttttatatacatacgctttaattatacaatcatcattcgttttcttttctaaacatttataactctctcttgttattttccgaaaagtatttgtacctttgtcattggaacgtagcatgccgttttatggtatgcgattgtgcgtttcctcggcccagtaggaaattgtagcgaatttttaaactcacgccgggaagacgcctgtacttctatgacttctcatagggtacgggctgtctgcccgtgtgtgttgggtgttcgctacaacctcctactggcgggattgtgacagctccgtactcttttataataaaaggtacggaactagttgatattattaatctagttccgtttttttatgtcaaattggctcacaacaaaacagatgtctgaaagacgcgacattcaagaagctattctaaagaattgggcaaatcttggatacattacgagttcccgaatcgacgatcagttgtttttggatgatgagagtttggatgcttatctggaagctcacaaaagacttggtttagaagcaggttacctttctaaaatcgtagaagaaaagaaactggaacgggactttatcatttccaaatacgatgatctactatatgtattgagaacacagacgacttgtaaaccgctatatgaaataatcattcgtgaactgtcagcattgattcttcaccctgttacccgcgatatcttctattcaatttctacaggagaatcagtagcgaaagtggctgatcggcatcgaattacctatgggaagacattgcaaatgtataactctatacttaaagggttgaaactgaaaaaagatatattggctacttatcgaaagcgtgctatcgatgctcgttttttatccttggtagacaataataagaatataaatgttgggcaggaggagtggatacttcaattgcctgttcgtaaagtagctgatacccggttggctaatatcttgtataatcaagatgttcgaacggtgaaagatttgttggatatagtatcgggaagaggttggaaaagtctgttgagaatagaaggagtaggaaaaacttcctactatcatttattatccaaacttcagatgataggtgttgtggatgaaagtctggatcggattcttgccggatgctctaatggtagttcgataataaatgacgggtaggacatgattatggaaagagagatgatataaagaggttattttaaaggaaagatagagatttcaacttctaaaatagcctccttatattatatatgtatgaacatacggtctatctctctgcctctattgtataagtaaagctgtctgcccgataatatccgacgttgtattcaataggtactccgttcacatcataaacaaatcttctccttattaatatagggtcattggattttatctccagtttctctgcaataaattcccctgcaagtctggctgaaatctcctccttgctggtctttaccactatattatattgggtttccagcatttcgtataatgggcgtgtataatcttcctctccggttagtggaatattggggttgaaataagagatgaagtaaacaaacggatattctttttttcctctgacacgctccatcactacacagcgagtgtcgggactggaacctaaatcaaagaatgtgccgatttcttcagttggacgctttaaactgatatgtagctcgaaattgcgaatctcgatacctaacatcttcatctcctgtgagaaactaagccagttctttactccgcctacgatacctttctttactacctttgttccgtagcctttcttgcgtaccaaaagcccctcaaacacgagcttgttgatagcttgtctcaatgtgttccttgaaatatgtaattgttcagacaattcgacctcattgggaaatagctttccgtttttgtactcttcagattctatgagtcttcttagtatctcttctgcctgaatatgaagcggtttatcactattatgatctaatttcatatctattctgattggtttattttcagcaaatataagatttatcaaaaaataatccaagttttgtttggaataaaaataaaatctatatatttgcacaattgaaaatatgtatgaacatataaaattttaaaacgctataaacatgagaaaagctaattatgataaatttccttctacgaagctgacggggatgcttgttcaggggtgggattctatcatttctatgttaaaagagaaaatggatgcaagaaaagtgctggcgatggatttatatacaggagtatatgaagaagaagtgctggatgctttttcaaaagaattctccggaagagtgatgaatgtacgtgatttgatgaaaccggaaaaagaaattcaaacgttgacagaacgcttcatgactgaagatgtgttattcggctatgttaccaatttgaagctggaagattatttggatgcggataaggtggctgctgcacggaagcaaatcagtgaagcaaaagaaaccattgtaatcataggtacgggtgctgctgttgttgctccacaggatgcgatggtagtttatgcggatatggcacgttgggaaatccaacaacgtttccgccggcatgaggtaaaagctttaggtatagacaatcggaacgatgctgtttctttgcaatacaagagagggtatttcaacgattggagagtatgtgataggtataaggaaagattgtttgacagggtagaattctggattgacacccatgtggccgggacaccgaagatgattgataaggatactttctttaaaggggtagaggcaacggtgaacacaccgttccgggtagttcctttcttcgatccggctccctggggtggtcaatggatgaaagaggtttgcgacctggatcgtgaacgtgaaaatttcggctggtgctttgactgtgtacctgaagagaacagcctttattttgaagtgaacggagtacgctttgagctgccttcggttgatttggttttactgaaaagtaaagagttgcttggtgaaccggtggaggcacgctttggaaaagacttccctattcgtttcgactttttggatacgatgggcggaggtaatttgagtttgcaggtgcatcctactactcaatttatccgcgacagcttcggtatgtactacacacaggatgaaagttactacatggtagatgcgggagaagatgccgtagtttatctgggagtgaagacgggggttgataaggaggcgatgatcggcgatttgcgtaaagcacaaaaaggtgaattggtgttcgacgcagaaaagtacgtaaataagattccgacaaagaaacacgatcacttcctgattccgggaggaacggttcattgttccggtgccaacagtatggtgcttgaaatcagttcgactccgaacctctttactttcaaactatgggactggcaacgcttgggactggatggaaaaccgcgtccgatcaatgtggaacgtggtaaatgcgtaatcaactggaaccgggatacggaatatgtgaatgaacaccttcgcaaccagtttaaagaagttgcttccggagaaggttgggtagaagaacgtaccggactgcatccgaacgaatttatcgaaactcgtcgccaccgtttctcatcaccggtgttgcattacacaaacgatagtgtaaatgtactgaatctgttggagggagaagaggccgtagttgagagtcctactcatgcttttgaacctttcgtggtgcattatgccgaaacatttatcattcctgccggggtgaaagaatataccattgccccgtatggtaaatctgcaggaaaagaatgtgtaacgatcaaagcttacgtacgcttttaataatgaaataaatcatctaatatcttgaaaactatgtatgaacatgatgaacgaatcgtaatgacgctcgatgcgggaggcactaatttcgtgttttcagccatacaaggctgtcgcgaaatagtggaacctatttgccttccggcagcgtccgacgacttggagcgttgcttgtctgttcttgtagaaggtttcctggaagttgagaaacgattgccgaaacttccggtagctatcagttttgctttccccgggcctgctgactatgagcatggaattattggtgacttgcccaacttcccggccttcaggggaggagtggcacttggaccttatttgagggaacagtttggtattccggtttttattaataatgacggtaatttgtttgcttatggcgaagccttggcaggcactttgcccgaagtgaataaacgcctgaaagaagcaggcagcagtaaggtatataagaacctgctcggaattacgctgggtacgggatttggtgccggagtggtgattgacagccggttactgaccggagacaacggttgcggcggcgacgtctggattatgcggaataagaaatatcccgaaatgatcgcggaagaaagtgtcagcatcagggctgtcaggcgagtatatcaggaattgaccggaaaggatgcttcttctttgactcccaaagatatatatgatattgccgaagggatcgcagagggagatcagcaggctgctgtccggagttttaacgaactgggagagatggccggtgatgctatcatccgtgcattgaatattgttgatggcttggtggtgattggcggaggagtggccggagcggctaaatacatacttccgggaattatgaatgagatgaatcggcagattggcacgtttgcaggagcttctttcccttgtttgcagatggaggtgttcaatctgtccgaaaaagaggcatttgataaatttctggaagaaaaagacaagatggtgaaaataccattttcggagagagaggtgcattatgcctgtcacaagaaaataggcattgctgtttctacattaggagcaagcagggctgttgctttaggggcttattcctttgctttgtcccaacttaatatcttataatatatgataactcttctattaattcaaatataaaatgttatgaaacaatctaatctattgaacgcgcaatttgcccgccggcttttcagaacggcattttcgagttggcaattattggctgttatgttgattgtttgtatgaatgtggctgttggttccaaactgtatgcgcaatctaatacaatcgcagtgaaaggtaaagtaatggcagacggggaacccgtgattggggctaccgtgctggtgaaaggtgtatctacgggtacggctacggatatggatggaaatttttcactgaatgttgcttcaaaagcggtattggtagtttcctcaattggatatgaaacacaggaagttccggtgaacggccgccagtttatcaatgtggtgttgaagtcggatgtggttactttgaaagatgtggtagtggtaggctacggcgtgcagaagaaagtcaacctgacaggagctgtgtcttctgtttctacggatgaattggaaggaaagccgatttccaatgtattggaagcgatgcagggaacgactcccggtttggttattcagcagggaagttctactccgggtagtgttccttctattaatatccgtggattgaatacgatgaacaacaatgatccgttggtgattattgacggaattgaaggatcgctgggcaatttgaatccggctgatattgagcagatttctattttgaaagatgcgtcttctactgctatttatggttcacgtgcttccaatggtgtggtacttgttactaccaagaaaggaaaagccggtaaggtggaaatctcttatgattttatgtatggtgttcagcagcctacttcattgcctaagatagcagactcgtgggtatatgctgaactgtataatgaagcggctgttaattcgggaagagctgcaaaattcactcccgagcagattgcgcaatttagaaatggcggtccgaatgtaaattgggtgaaagaactgtatcaccgtaattctcctcaaagttcacacaatgtttcgatgacaggaggtaacgaccagttgtcttacatggcttctttgggttatatggatcagaacagtatgttcaagggacctgattatggttataaacgctacaatgcacgtctgaatgtaagccataaggtgacgaataactttacattgaatttgacttctcaatttgcccgtaatgatattaaagaacatgcttactggacggaatggattatcgagcaggcaaaccgcatgccaccgatttatccgatcaagaatgaggatggcagttataattatcctgccggaagtaactcaaacggtttgcagcgtttggaagaaggcggttatcgccagaatgtgaatgatgaattattgggaaccatacaagccgaatgggaagtatataaaggactgaaactgatcggaagtgccggtggacgtgtttggaataataatttgcatgagaaccggaaggccttcgaaggtacgggagatagtgaaaataagttgaccgagcaattctatcgttctaagaatatcactaccaatcttatggtgacttataatacgaaaatagggaaacactctatcggtggattattaggatatgcttatgagggtttctctgaaaagcagttctctactagtcgtttgacggaggattctaaatatgatatttttgtaggtgatttgagtggggataaagttagcaatggtggttcggcaagtgactgggctatctattccggttttgctagagccacttataattatgatgagaaatatctgctggaatttaatatccgtaatgactattcttcttattttgcgaaaggaaaccgttcgggagtcttcccgtctttctcggcaggatggcgtatctcggaagaaaaattctggtctgtactgaaaccgtatgttccttctctaaaaatcagaggttcctggggattggttggtaataaccgcattggtgcttatcaatacatgcagacggtgtctgtaaagaacggtatcagtttcggcgacaagctggcgcagacggctgaatttgcttctacaaaccctgatctcaaatgggaaactacccgtatggctaatatcggcttcgaattgggattgttgaataatgatttgaatattacttttgattgcttcaataatcgtacaaaagatattttggtaaatttaccggttcccggattgtttggtaatggtgccccgattcagaacgctggtaaggtagagacgagaggatgggaattatcagtaagttatcgtttgaagaccggtccggtagtgcataacttcgccggaaatatttcggatagctttaatgaagtaatagatacacgcggtacggaaattatcggtggctcggatgtacagacaattatcaaggaaggttatccgttgtactcttactatgcatatcgttcggatggatttttccagaatgaggaagaatgtcagaaaggaccgcacttggaaggtattacaccgaaaccgggagatatccgttatctggataaaaatggcgatggtgtgattaaaccggacgatgaccgttttattgttggtaatgacttcccaagatatactttcggcttcacctatggtttggaatataaaggttttgatttctcgatgatgtggcaaggagtaggaaaacgtaacaagtggatgcgtggtgaatctgtagaggctttccataataacaatgaaggtcctgtaatggatttccatcaagaccgctggactccgaataatccggatgctacttatcctcgtctgacaatgggtgcggaatctgctaataatgcagcgaaatcagatttctggatccaggatgctaaatacttgcgtttgaaaaatgcgcagatcggatatactttcccgcaacaatggatgaaaaaactctatgtcaagaatttaagaatctttgccagtgtgcagaatccgttgactttcacaaagatgaaaggcggatgggacccggaatataccggagacggcagtggtcgttcttatcctgtggcaagagtatattcatttggacttaatgttaaattttaaactgtaccgtgatgaaaacaactataaagaatttgattttatctgctgtcttggtagtgggcggtgcctcttgtgttgacttggatacggcaccatatgacagagaaacggacttgacttattgggaagaggaccctgaagcagctgtcaaggcgttgaatacttgctatacttatttgggaaatatggacgaacagctttattgtgaagcaatgacggacaatgcttataccaagcaaccgaacgatgctacacagaatatcggtaatggctcatattctacagcagacccttacgtgaaaaaggtttgggacggacgttatacggggattcgtatgtgtaatgaactattggagaatattgatcgcgtaccggatttggatcctgaattgaagaaacgttatattggcgaggcaaaagtgcttcgtgcttataattattatgagttgtatacgaaattcggcgatgttccttatactaccaaagtgctttctattaaagaaagtatgtctattgcacgtacggccaaagccactgtaatagcaaatgttttggccgatctggatgaagtgattaatggtaactatttgccgacttcttatgatgcggataataaaggtcggattacccgttgggcggcaatggcgattaaagctaaaatctatttgtttgaaggtaattggacgcaagtgaaaaatatcacttctaccattatgacagagggaggctttaaactctttggaagttatgcaggattgtttgagatcgctaatgaatacaactctgaagtaattttggatgcacagtatcgtccgaccagtcgtgaacatcagatgatgtatgttttcctgccgcccactttgggtggatattcccagctttctcctttgcaggagttggtagacagttatattatgctggatggaaaaacaattaaggaaacaggaacatcgtttgatgaaagtcatccgtatgctaatcgtgacccacgtttgaaggcaacggtgatgtacactggaaactcatatacgttggccgacggaacagaagttgttatcaactgtgagaaaggtgaaggcaaagatggttatggggtaggttcagactgttcggctaccggttactatattaagaaatattgggataacacttatcgtgctactctttattctggtttgaatccgattctgattcgttatgctgatattttattgatgaatgcggaagcattggcagaattaggagaactggataagacggcttgggatgcaactattaaaccaattcgtgatagggccggatttacacttgcttcagcactggaattcccggaaggagcttctaaagataaactgattgagattgtacgaaacgaacgtcgttcggaattggcattggaaggacatcgccataaagatattatccgttggagaattgcggacaatgtattgaatggatggtgtcacggactaaagacaaatgatgtggtaggtacggatgatggatacgttcgggttgaaaacagaacctttaatgcaaataaacattatttgtggcctataccacaggctgaacgtgacttgaatggtaatttggagcagaatccgaattggtaattggttaaacgactcaaaaaggaatgattatgaaaaagatattatggatatgttcagtacttctggcaatggtttcatgtcaggaagattatgaattgaacacggattttgcagtccctacagaattaagttcccctgcttctatccagttgaatgtgtcatctccaacgcctgttgtgttgtcgtggtcaggaggtggtgcggcagatggcggaattgtattgtacgaggtgctgtttgataaggcagacggtgatttttcaaagccgctggctacggtgaaaagtgatttgggagctgcgaccagtttgtcaatcactcatgcagctattaatacgattgctagaaatgcaggcatttatcctttggaaaccggagatataaaatggacggtaaatgcttcgaaaggtggagtggtgaagagaaccgacaaggtggctaccatcacagtaactcgtggagagggaattgataatattccggctgaattgtatttatatggttcggctacggagaacagtggacaggggggaattccgttccgttgtgtagaagagggcgttttccagatttatacgaagttatctgcaggaaatatatcatttaagtctgctactacaggtgaaacattcagctattatattgatgatagctcgaagttaagagaaggggagggcgaaacggcagtcgctgcttccgaagaagtaacccgtctgactgtgaactttaatacaatggcaatgaccacggaaaaaatcggttcttctgttcgttgtatttggggagcaacatttggagatatagctgtattagagtatgcgggtgatggtaaatttgtgggagagggtgatatccgattccttgatccgtccaaaccggaaaccggtgctcctgattggttaagttggatagaagaacgttactactttttagcaaaagtaaatggtggtgatatgtgttggggtagaggtgatggcgtgagtgccgaacgtccggtaggtggagaacctgcttctttctatgctttgtatgaattccaatggagtcagtgggatcatctttggaaaatgaaaggtagtctggattatacgcatgcgactatcactatcgatacgaattcggatggattgatgatacatacatttactaatgtgactccgattaattaataaaactaagttatgaaaaagataaagactattttagctattcttccggcactattattctcctgtgccggagatgacgtagagaaatatatcccgcctacaccgattgctccgtcagaacccggagaggaggtcgtttatcataaacgtgccaaagagcagtttgacttgattaatcagtgctaccggatcaatagtggggcaacagaaggactgtataatgaaaattatcctaagaaagacggggataattccgcttctttcttgtggccgtatgacggactggtttccggagcagcagctttgcatgccttaggttatgatgtgaattatgcagatatggtagaccagtttgaagtttattatcgtactcctagtggaactgtgggtggttatggttctcaaaccaatggtactaccggtagtggaacacgtttttatgatgataattctattgtggggattgaactggtagaggcttttaatttgctaaataatcaagattatttaacgaaagctaaaagaatcgttgagttcctgcaagctggtgaagatgatacgtttggaggaggtctttggtggaatgaagaccagaaaggacagcagggagttggtgattcgaataaaccgacatgcgctaatggatatgcaacgctattcttgcttgaatattattctgtatgtcctcaagaggaaaaagcggatgtgttggctctggcaaaacgtttatatgcttggacgttgactaacttgcgtgatccggaggatggctgttactggaatgataaacaagcagacggatccattaataaaacaaaatggacttacaatacaggtgtaatgatttctaacggagtccgtctatacaaaataacaggtgagcagacttatctggacagtgccattgcttcttccgaaggtgcgtataattattttgtacgtccgcttaatgggttggcgttggcttatcctgatcatgacccttggtttacaaccaaattagttcgtgcatttattgatattgaaccttattacaaaaatgcaggcaattatatcaaaacattcatcaacttcctggattatgcatacgaaaatgcccgtttatcaaacggactgttctatgaagactggacaggagcaactccaaaacgtgctgaacagttgttgatgcaggatgctgcgcttgaatctttgggaatgattgctttgtacaaaggagaaacagtgacagaggaataggatatgaatagtaaaattagaaatatagttttatttgtatcgacggtattcgtgcttctttcttgtgccggagaatcaaaaacgactccgaataaagataaggcagaagaaatgtttcagcgtgtttgggaactctaccgggttcccaaatacggcctcttctctgaatattacccaagcagtcatcgtcctgatctgacttattttaatgattccacccggcaagcgcaggaagtttcttatctgtggcctatgagtggtgtcttttcttcggcagtgttgatggctgctatcgaaccggagaaatatacggtttatgtcgattcgatggtgatggcaatggagcgttactatgatacaacgcgtgttccttttggttatcaggcttaccctgttcagtttggaaaggtagaccgctattatgatgacaatggtttggtggggattgactatattgattcttacttggtaactaaaaatcctcattatctggagaaagcgaaacaggtattgacctttattttaagtggctgggatgagaactttgaaggagctgtttcctggctggaaggagtgaaagatcagaaacctgcctgttctaacggaaaagcgatggtgttggctttaaaactttatgaagcaactaaagatgagtattatctggaggtgggaaagaagttctatcattggattgataaatatctgaaagatccggaaagaggagtcgtttggaattcatggttaacaacgacttcggcagtatgcccggatttgtatacttacaatactggtactttgttacaagcagctgtagctttatataattatacgggtgagcaggcgtatctggataatgctaaatttctggcagaaggaagctacaaagtgttttttaagtatacggaagacggtattccttatattgcagatttgccttggtttaatttggttttgtttagaggttatcacgatctgtacaatgttacgggggattcaaaatatgtggatacgatgataaaaggactggattatgcttgggatcatgcgcgtgatcaggcgggactaatgtatcatgactggacagggcggactgatgaaaaacgtaagccgaaatggttattggatgcttcgtgtgtgccggagtattatgcacgtgtggcgatgattaaaggagaagttacaaacagaaaaaataaataaatgatgaaattaaaatggataggcagcttgttgattttggcaggtgttgtagggtgcaaaacacctgatcgtcccaatttggtagaatatgtaaatcctaatatcggaactgtacatagtcgttggtttttctatactccggctgcggagcctttcggcttggctaagttaggtgcatctacaaacggtacgtatggaaacaatcaaggttgggaggccgtaggttatgaagacggtcatacttctattgatggctttccttgtctgcatgagtttcagataggtggcattgcattaatgcctgtaacgggagaagtaaaaacaaaccccggaaaactggaagatcccgataaaggtttccgttcctgttttgataagaaaaatgaaacggctcgtccgggatattactctgtattattaaaggattatcaggtaaaggcagaacttaccgctacggctcgtgtcggatttcagcggtatacatttcccgagtcggagaatgcccatattttgtttaatataggtaatcgtcagggagaaagtggagcagtgcgtgatgcgtatatcaaacagatagatgaaaatacaattgaaggttacgtgattacggaaccggaatacgtgaagaaatatcaggcaggcgcttccgttgccatgtatttttatgctaaattggatcgtgcgccggaatctgtcgaggtattctatcaggatagtgctttaacggctcgtaacgaaataaaagggcccggggctatcatgtgtctgaattataaaacaaagaaagatgaagtagtcaatgtaaaaataggtctgtcgtatacttccatcgaaaatgccaaagtgaatttggaatcagaagcgaaagaccttacttttgatgaggctatgaaagcgaccacagataaatggaatgagtctttgagccgcatattggtttccggtggtacggaagatagcaaaatcaaattttacactgggttgtatcatgcattattaggtagaggactcgcgagtgatgtgaacggggcttatcctaaaaatgacggtactatcggtcagatacctttaaataaagatggcaaaccggaacataatcattataatacggatgcggtttggggagcttactggaatcttacttctctttgggcattggcatatccggaatattataatgactttgtaaacagtcagttgctggtgtataaagatgctggttggctgggtgatggtattgcaaccagtaagtatgtttccggggtaggaaccaacatggtgagtatcactctggcaggtgcttataacagtggaattcgcaattttgatgtggaaacagcttatcaggcagcattgaagaatgaactgggctgggaaggacgtattgaaggtgcgggcaaaatggacgtaaaacagtttgttgaaaaaggttatgtgccttatgagaatagtgttcatttcggcacccatccggaaggttccagtttctccgtatctcatacattggaatatagttttagtgcttatgcggtggctcaatgggcaaaagccttgggacgtacggaggattataaacgtttgatggaactttctgccggttgggagaagttattcgatgattcgttgaagatgattcgtccgagagtgcctagtggtgagttcattgataactttaatccattggaatcatggagaggatttcaggaaggaaacgcgatgcaatatactttctttgttccacaaaatccggctcgtttgattgaaaaggttggaaaggatgaatttaacaaccggttggattctatctttacggaagctcgtaagtcgatctttggcggtggaaaggttgtaaatgccttctcgggtttacagagcccttataatcatggaaatcagcctagtcttcatatttcctggttattcaatttttccggtaaaccttacttgacacagaaatggacgcgtttgatttgtgatgagttttacggaacaaacggagagcatggttatggctacggtcaggatgaagatcagggacagttgggagcttggtatgtgatggcggcaatgggattgttcgatgtacagggcggttcttgtgaacggccgactttccagattggcagtccgttgtttgataagattgaaatcaaacttagcccgatgaatgcgacgggaaaaacgtttgtgattgaaacgactggtaatataccggatgcctattatgtacagtctgctacgttgaacggtaaaccgctggaacaatgttggatgtaccgggatgaactctataaaggtggaacattgaaactcacaatgggtaatcaaccgaatgaaaaatggggagtggaaaatccgcctcattgttctgaataaacagcttattttcctcggtgccgatgttgcttgacatggtgtcggggactctacattttataatatagtgagttaaatatgaaaacacaaaactctatttatgccgcccttcccgttcttttcgggttctttgtaatgggcttctgtgatatagtcggcatttcgtccgattatgttcaacgtactttcgactggtctcccgtgatgacgggatttgttccttcattagtctttatctggtttctgtttttgggtattcctattggaaatcagatgaacaaatggggacgtaaaaatacagttttacttagtatgggaataacggtagtgggtatgctgctgccattagtcgcttataacagtgcgacttgtatgatagcttatgctcttttgggaattggcaatgccattttacaggtttcactgaatccgttattgagtaatgtggtaaccagtcaacgtttattgaccagtagtttgacagcaggacaagtgattaaagctgtgtcttctctcgtcgggccggagattgtgttgctggctgtagcacattttggagatgacaaatggtattattgttttcctatattaggctttatcacgttattgtctgccatttggctgatggctacacctgttaaacgggaagcttccagtgccgcaacccaacaactttctatcagtgatactttttctttgttgaaggataaaacgattctgttgttgtttctgggtatcttttttattgtgggagtagatgttgctaccaactttattagctccaaactgatggcggaacgatttgactggacggcagaacaagtgaagtttgccccacaggtttattttttaagccgtacggtaggtgctttgctgggtgctttcttgttagcccgtattgctgaaatgaaatatttccgtgtgaatattgttgcctgtattttctctttgcttattctggcctttgtaaaaaatgatatggtgaatctgatttgtatcggtgctgtcggcttctttgcctcatccgtattttctatcatttactcgatggctttacaggcaaggccggaaaaagcaaaccaaatttcaggattgatgattactgctgttgccggtggcggagtagttaccccggtgattgggtttgcaataggaacagtaggtgttattggaggcgtttttgttactttagcttgtgtgtgttatttgacttattgtgcttttggggtgaagaccgcgaaagcgtagtattattgcggagaagatgctatcttcgcccgaatcctacttagcgactgcggagttatccacaagtaagacgctatatgttttaaaggtacatattgcaataattcaggagtctctttgataaggttgagatagcgttctttagcccgtgggcttcccgagctgataagccagttctcctgttgaagaaactgatgatccatgaggcggagccccaaattagcgagtccgatggatgaggcgaatagctgattcagagctgttcgggaaatacaataggccacactgtcacacatgacctcaatatttattaatgagtaggcattatctacatagccccagacggagaaagcagcttctccgtctgaagcaaaccagatggtagtatccactccgtctttatgataataggctcgccatattcctgtcttgataaaataaagattacagttctttgtcccctcgcgtactattaaatctctctttttgaaatgtacctcttccatacagttcagtagagactgtacatcggtttctgataccttgtatctatcgcaaagtttttcaatgaatgttctcatattgcaaagatacttatcgtcggcagacaatgaaacgatctttcaaataaattccgaaaatatagaaagtggttaataactctgccaatggtacggctagccagatacccggtatacccaataccggagggagcgcaaagaatccgatcaacataaatacgactccccggagaagagtgataattgttgcccgctgacctctttcgacactctgataataaccaatgccaatcatgttgacggcaaagaaaatgaatcctactccgaaataaggaagcccgtttactgctatatcaaatgcagcgtagctgcggtcaatgaataacgaaacgatgtcttggcagcatagtacggtaagaatgaaaaagctgataccgcagattaaagcggtccgaatggcgagatgcagtgtctttcgtacacgctcgggttgtccggctccgaagttatagctgataatcggctgtgcggattgtgcaatggcattatagaccatgaagatgatagggaagaagtaacaggcaatactgaatgctgccactccgtcttcaccgagatggcggatgaaaacgtagttccccagaaacatcatacaggcaatggaggcttcactgataaaagcagaacttcccagtttaatcatataaccgatgttgcgaagagtcagtaacagacttttgatacttaactttatccggcatagatggagggtacgagagaaacggagtaagtaaatcagtgtcatcaaccctcccacgacagttcccagactggtggcaaaagctgctcccattattccccaaccaagttcgaagatgaatatataatccagtatgatattgagtatggctgcaaccgcattacacatcatggcataggtgggtgaaccgtccagacggatgcagaacatacctatatttaagacttcgtagaatacgagaaaaggaatgtaccatgccatatattctacagctaacggcaacaatcggtccgaactacctaataatctggctaatggctctataaaataaaggcacagagcagacaggataagtatgagcaatgcggaaaaagcaattgcctgagtgatattaatacttgctactttgcgttttccctgagataaatgaatggaagccaccaccgaagctcccactccgaacatcagtccgatacccgctgcgatcataaaaagcggtgcagtgatatttactgccgccagcgcgtcactgccaattccttttcctacaaatatcccgtccgtaataacgaacagagccgagaataccatcccaagtaccgtaggaattagtaacttacggaacaacgtggagatgttcatattgccgaaatcaatactatctttcataactttctatctttgtcgttgaaaatggcgacaaaggtagggttatgggaggagataaaaattaccatttggtaatttttatctctatatttaatagggaaaagaatctcttatgtatattctatcaattatttgagcatgttgaaatcctttattccaaaaacttcagtggatatttcacccaaccaaccgcttttactattaacacccacttgtactttgataaaatcaacgtacttcaggtttgcatccttaccgtcgaaagttacagcatgggatatcttgaaatgattgtcagacggtccggcattatagttgtcatcatctgtcagacgatcaatggcgctgaaattatcagcatatccccattcataactatcatttacccaataagtaccattaccggattgatcgtaattacgctctttcaggcgagtacctcgcaaagtatattgtttttcctttacccaggcgggataataataatcttgccggtgaaaagcacccagataatcaatagacccactttgaccatgattgtctgtccatggggtgggaagctgaataccagttggtttatgataggtgacggcatagtcctgccaggtttcggctttcccatattcggatccgcgcaattcataccaagtgtcattaggtaacccatcaccattttcgtcctgcattacccatacaattcccggttctgacgaaccatcaaaagcgtttcctgtaatagcaatgttgtaatctccatcattcacgatactatgatcgaatccaacgatgatgtatccaccgaatccgcctagggaaacataagccgtctgattgattcgttcttctgcataggtgcaggcttctgccatagttgttgtggtatgattctcattgatgaattgaccgggagccggtaaatattcatatactctgttcattgacgcagaacttgtggcgctaatcttccgctggtatgttcctgcgggagggcaaacattgatttttaatgtttgcgtagcgagtatatatgagttcctcatttctacctttactgtgtgttctccctgctgctcggatgtaaacagataagtatcattttctccggattgcacttgttcattgtccacagtccatgtatagactgcatccagtgcattattcacgtcaaccggtttgatacggatagttctgccggctgacatgttatattccgtttgcaggaatgtccagttgaaatctacttgatccggtgaacaaacttctactttgaaagttacttcgtcatcgccatcttcattgtgagtagcaaaacgaacctgatattcgccaagctcgattgtggggagagtacaggttaattcgttcgaaatatcttcaccgtttatttgccaggagtaactggtttccagaaaagaatctactatgggtgtaatggttagttcagagccttgaagcactttgaaacctttgtcggcatccgcaatagagatagtcggtacatcaagctgaaagacatcgatacgtatctctttttctgttgtccctccagcattggtggcagaaatcagaatgaaatacctgcctgcttcatcggctgaaaatgtcagggtggaagcggtacagatactctttccatctattgtccagttaaaggtcgtttccgaatcggtattttcataaacaggagcgatggttatctcccgaccaatttttgttttatagatgggggattcttctttcagggtaatgacaggagcggaaagaagaggagagtcctcctcttctttcacgcatgatactaatgcgaacagaacaaataaaagaagtataatatatttcattagaatctcactgctatgtcatcataagcaaaataggcgggttggctgaaaccatatccgttatcattacttccagtgacattaaagtctatttttaccactttgcctaatgcggataaatcccattttgtccattcaagtatattaccctcggctccgaccagataaaattccggacgcgcagctacttcatttccatcttcatcataaccgatagcaaccagtttcacccaatcatctttgcctgcgggtgcggtcaaaccgttaccgttggccacacagttggctaggtaggtcgtcatagtcacatacatgtggtcaactacacgagcaactccgtctccaaagtaaatatagggtaatggaccgttggcatatccggaattgtctgcatagccgtaatgtacgcagaagtttttggagccattatgtcctccaaaaccagtttttgcatcctgataataaaccgctagttggtgctggaagtctccatgagtaaggtccatatccagataattggaaattgcgtgtccgccaccccagtattggtaatcaccccatccgttaggaagttcggaagcaagaaaagtattgtttgcatcactccagttatagagttggttattcttaggataaagtagtgggccaccatattgttggctgtcaattaatgatgaccagtttctttctcctaccatgttagcatcacctttataatcaacatcctcgaatgtcaagaagtgtgcttcacgcactgctcttaattgcatttttattactttaccgaaagctttggacggagtgacaagtattttaagttcaccatctttgacatcatcacctgaaactgccggagctgtgattcttaagtctttatcattaagaaccgctgtccatccttgcggaatagcaattaatgttgcgtcgtctatattggcagttgtaagaagatacgttcttgtttcattagacgagaacaaggtataatccctattggcaatgtcaaatgtatatgtttcccctttgggcaatgtgaacgacgttccatctgcaagagtaactagtacatgattgtcattaactgtaacagatttgaagaaagagtctccgtcttgtccttccgctttcacaggtttgccgtctgttccgttaatgcgtttggctccttcgcctgtatcaacggtccagtatccgtcactgtcaactcccataactggagttgtacctgtcacttttaacttgttagttgcatccggcagccattctgtagtaccgttggtagtaatggtccagtaatatattccgtcttcgtcagctttcactccaatcacaggagcatctgtaccattctttccatttttgatagatacggtgcttccatcactgaaagttaatgtgtagccatcagatgtctgttccgtgctggtgattactttcccttgatttaatgcgtctaccaaactctgtaaagttgtaatttcagagttcattttcttgactgttgtttctagtgtttctactcgtccgtcaagatcattgactttatcccagagatcatcgtcattgtagcaactgcataccgtaatgatagtgagcagtaaaaatagaattttcttcattgcttttgtttttaattagtaatagtgatatgaattattgaatcgcttttagtttcttatctgtaaaggcaatatgtgccggaatgtcccccgtgatgactgaccatttcttttttccatcccgggagaaacagtataatgtgccgggagtcacatagtctttggcatcggtgacgaagaattcacctgtttccggattgattgctattccataaggtatcttgatagatttttccgtaccatctgtaataaaattgcgggtatcagttttctttgtttttgtattatagatggcgtaagagactgtccaactgttggtgtaataactccattctgtactgtatacatacagtgaatctctgcaaatagccatttctgtattgggaagaagcggtaattcttcgattactttatcggtattggaatctattacaaatgtttcggagtaagtgtcataataatctccccgggatgagacataaatatttccgtattggtctaattccattctatgcaaattgattcccacatcaatggttttgataactttgaatgtgttcaagtcgatgacggataccgtgcggtcataattaggtacgcgatacccgccggagttggctacatagagtttgtggcccacaatcaccatttcttccggctggtagccgaccacacaggtatccttgacagtcagtgtggtagtgtcaacacgtgctacataccccagtctggcgttgggatctattttgacagggcctgcatacgaactgacgtatgcatatttatctttaaagacgatataacggcaattaggtatggaaatttgcgtgatgtgttttgctgtttctacattcatcacttctacgaaatgagaacagttgatgatggcatataacttatttccatagatttggatatcatttcccacatcccccaattcttgtacgactcccgggttccgttccgcatagatattcttatgatagataccggtttcgtaatcaaagtaatcaagggtagccttgttgcttcccatatttccttcattgagtagaaagaaacctttgacagaggtaccgcttactccgggagtaacttggttgggagttgacggaataatgcgttcatcttcgcgacaagaagtcgacagaagaacaaaacagataatgatggatagaacagatattctcataacatgacgtttaatttgattttaaaacttgtgccgggcataggatagcattgcactacttcatattgctgattgaagatattattaatttctgccgttacacgtattcccgttttcccccattgaaaagttttggatagagaaaaatcgtgggtataccagggctgtgcatagttctccggaatattggcgactgcttcatagcgttcacctgtataaatgaaactatagttgcaggaccatgtttgataacttccattgaggatgatggaacctccatgccaaggtatataaggaatctgacctccataccattcactggtagggtcggtaaaatcctgtgccttttgataggtataattgaagagagtgctaagttctacctttccgaaaccccattctcctcgtatggctgcgtctaatccccgaatttccacatgtccgagattaatcatagtccaacggaactggttggaggtaggcatggcaatgattttatcatctacttcattatagtaaccatctatttgtaagtccaggcttttcagccaatggttattccaggtgtgagagaaagtgatacccacatcgtattgggtggtatattctggttttaagtccttattgcctataaaagtataatacaaatcattgagagttggcatgcgaaagactttcttataaaaggcccgtacattcagagggagcttggtcaatggttgccaggtggctatgacagacggagtgtatttgtttttggtgcctgcattggctcctttggtacgtgtattgtcgtcgacatgagtatataacaggctcgcctgcaacatgaggcggttgaagtcaaaggacgtggcagcagaagtcaggattgtattacgggttggatagacaaaatctatgagatcggcccgtaatgcattccattgaaaatcgttggataatgacatactccaccagggatagatggtgaataaatgggcggccgaagcataaatttcttgctgtcggtagtgattgtctacgtacatggtggtgacatccagtctgggatcggataaatagtggagatagtcataagcatattttccgttggctagcagactgtaccaaggcttaaaatagttttgaaaagagccttgcacaaacagattggtatcccactgccggtcctgatggcgaaacttacccggttcttctcttaccgcagctccggggtatcctcgttctgaattgtataggtatgctttggctttccattctcctttggggacttttccgaagaatgcattctccaaacgtaacattcttacgtctccattttgacgaacagctgttgtgtcgtaaccatctttcttggcgtatgtgaatttatatcgtcctgatgtatacatatactccgtactgatggaactgcttattcgttcgttgaaacgatgttcccaaagtagtgacggattgatggtagagaatgaaccgcctttcaccccgatgttcagattgtttttcttttcccctttgaataggggttttcgtgtctgcatatatatggcacttgcggaactataatctttggcaggttggaagatggcacttttttgaccattatatagtgaaatgacttccatattatctaatgaaaaacggcctagatcgacgactccattttgcgcatttcctaattcaataccatcataaaatactccgacatgatgactgcccatacttcgtatattgacggtttttagtccgccaatacctccataatcttttatctgtactccggaaaagtagcgtaaagcatcggcaacggagtaaacatttagcttctcaagttctttgccggacagtatctgcacaggagacatctttttttgcatccgattactgtagatagtaacttctttgagtttgagaagtgtatcggacagagaagtctgatgccgaaccttggattgggaaatggccggtaatgtggtaaataaagatagaatcaaacataatatccaccgtaaatggatacaatgcttatggtatgaatggacttgaatagaaagcatgtcttttattttataggtataaaaaatccgtttgttcagatctgaattcaatctacacaaacggacatatagctattataccaaataaaagataattgcttattttctatttgactactacccgaaatcccgcaggtgtaaatcagagcatcaaggcaggtcttctgactcatcccattttgcaacgccttcccagataaactatccagtgactttcgtgttgcaattttgctctctgattacaaggagcggagatttacagcagcaggttctgttgccggtttacacggcattcccttttaattccttaacagtgtatatactgtaacaagaaaccttaacgccacaaagttagagaatttattaataactttatcttgtttggctaaaaaatcagcttacgagaatcatattttattatttatatttttatcctagtgataaaatgtttattttatacgtaccctcatcttttgtgcgtcgaatgtcaccgactcgtttcggaacagtctttcgatatgtccgctcgctaccatttctggggtaggcagtgtatacatatgcgggttatctatcagcatgatagagtcgcagagtgacagcgctatgtcgaggtcgtgtgtggaaaataggatacatttgtcctcttcctgtgccagtctcttcaagagcaggcagagttcgtaacggttaggcaagtcgagaaaggcggtgggttcgtcgagcaggatgacaggggtgtcctgggctagcgcgcgggcaatcatgattcgttgacattcgccgtcggacatcttatccatggtcttttccgcataagcggacatgccgaccagctgtatggcagtatctacccgcatttcgtcttccggtcgtagttgtccgatccagtttgtataaggggcgcgtcccatagacactacatctttacagcgaagattggcgatgcgtactttgtctgtcgttacaaagctgatgctacgggctagtttttccggtttcaacgaggctatttttttgccttgtaggatgatttctcccgactgtggcttttccagtcccatcatggcacggagcaatgtactctttcctgccccgttgcgtcccagcagggcgatgagttgtccgctagtcatccgggcatttaccatctctaacagcgtacgctgtccatatcctaatgtcagttctttaagctctatcatttgaatctgcgcaagtttttagcgattacccataaaataaccggaacacccagcagggcagtgatgcagttcactgggagcaggaagctcttggcgataatgtcacagagaagcatactgataagtcccgtcaacatggtgccggggacaagtatccggtggtcggcattgttgaacagcaaccgggtgacgtgtggcacagccagcccgatgaaacctaccggaccgcagaaagcagtgaccgttcctgtcagcaatgcggtagaagcgaaaatgaaggtgcgtgaacgcttgatgttcattcccattgtccgcgcgtagttctcaccgagcagcaataggttcagtgacttgatgcaagctacggagaacagcagacctatgcacagcatcggaatcatgactcccagttggggggcagtgatatggctgagcgagcccatcgaccaaagcgtgaacattttcagttgttcggcagaactcaaatattgcagaatctgtataatggcacctgccacgtatcctatcataacccccataatcagcacaccgagaatatttttcactttccggctgatgacggctactcccaataggatgacagccgttcctatccatcccgaaccgacgatacccaatgattggagaagcgggaagttcgtccatccgagcaacggagcgcctagtataaacagagccactcccagtcctgcgcccgaactgactcccagcagataagggtctgccagcggattctgaaaaactgtctgcatctgcaggccgctgacggaaagcgctacgcctatcagtcccgccactactacccgtatgaaccggatggaaagtaggatattgcgcgttgtttcgtcatattcgccgccggtgagcaccgcccatactttcaagacagggatgtacgtatctcctgttgccatgtctatcaataataatagtacggcaacgatacctaatgcaataaataaaagggcggtatgtttatgaggttgcttcatctggaattgcgagtacgtttggtgaataaagattcgatcattcttctaggcataggttcgtttcattccagatgcctgtaataatagagtgaatccggcactagttctggatggaagatatgaatcaggtcgcgtagaaccacgtcagggcgtatcactgccgattcccagtaatcattaccgcccgtcggggtcagccgcaaattattattataaaccgtccgttcacgtacagctttcgcatccgcgaatttcggattgacggttttcaactcatccagactcgttgccgaacctacattaatccaataatccgctttttgtatcagcccgtaagccgtttccagtccaatcgaggttgaactgttggaactgttttctttgtagatatactctgcacccgcatccgctactagttgcgccatatagctttttgtagaaggcatcacccaactgtcgttccacggtgtgttgaacataactgttgggcattgtccgaccgattccgtgagcgctttcaatgacagataacgcttcggaatctcactgaatatttcgatacccttctctcggctatccgtcagttcggacaaaacaaccatccattcggctttgcctagcggtgattcctccaagtattcgcccatataaatatagggaatggatagttctttcagcttgtctgtaatggcggtctgtgcgtctccgataccgtatagcagaacgatgtccggcttcaatcctagcaacagttcataattcatctcaggtcccatgtccttgatagaatccttatgcgcaaggatatacgggttcgatacatagtcgatgcccgataccgccacgattcggtttacctgtcctagtgcatcgagcatggcgatgtaggaagaagacatacatacaatgcgctttgctccggcaggaatggtagaaccgatgaatccggtgggtgcctgctctccatttcgtgatatgaagtaggacatttctacctctttggctccctgccatgggttgaatacctgtatcagagtactttggacattggttgcgcctaatatcttaaatcctgccgcatattcaggagtatatatatcctgattgaatgcttcgagagaagtctttttgttagaaatacaacttgccaaaaatagcaaggagaatagaatgaaagtgtaaatggattgttttatcattttatttacatttagttgtaacaatcttgtaaacatatcgtgcaaatatatgaattgttttctaatatgttattattccgtttctacaaaattgctacttatttatatatcgcatatagcgaaatttcggtcttatctcgtttgatgtcgatattgactttgaattctttattagaataatgtccaaatgaaaatttggaggtaaacaagaatgtggggagcttttgggatttttcacagaactttctcttgaatcatagttggattgtgtacttttaccctcgtaaaactactaaaagagactagcttatcgacatggaaattaataggacgattggattgcttttgttgttatgttgtatgcatacaattttatatgctcaacagacgagaactgtcaaaggcagagtacagacgttggaagcaggaagtgataagctacagtctttaccttcagctagtattgttgtcttgcaaaaggaggattccacttttgtaaagggtacgacaagtgataagaacggtcgttttgttcttaaatatcagccgcagaacagaaggcaatatttattgaaagtctccttcatgggaatggagtccgtataccgtatattgagtgattcgctgtctgtgaatgttggtgtggtcacactgaaggatgatgatatacaaatcggtgaagtgacaatcacgggaaaattgaaagaggtagagatgaagggagatactaccgttatcaatgctgctgcctataaaactcccgaaggttcttatctggaggatctggtgaaacgtgttccgggattggtgtataataagaaagatcattcgttaacttacaacggtcaggctatcagtgagatcaatgtcaatggagaatcctttttctcgggggataagaaaacggcactcgaaaatctgccggcaaatttgattagcaagctgaaagtatatgataagaaatcaaaagaagaagagtttaccggaatcagttctggagagaaaaagtatgtgcttgatcttcagactaaagatgaactgaacaagacttggctgacgaatgcgacggtaggatatggaaataataaaaagaaggacctggaaggacaggtgaattattttaataagaacggagagaatctttcttttatggcccgttctaccaatcgctatcagaatagcacttataaggacaatatcaataactctgtcgggctgaatatgacgcgcaagttcggcaagaagttttctttgaccggaaatgtgaactatgacttgaaccggaatggaaatatcacttccatgtatcgggaacaatatttgacgagtggcaatcagtattcggcttctgccaatgagggtacttcgaaaagccggtctatgaattcgagtctgatgggggaatggaaagtcgataagcgtacacgcatacatttcaacgggagtttcgggctttctcccaacgagaatgagagcagtaatcagagtgcttcttttgatgctcctcctaatgtgaatcatgagagtctgtttgctgattttgaatctatacctaaggatatgaaagtcaatcgtagtgagaaccgttcggcttcggaaaataaatccaatcgttataattggatgattgggattatgaggcgtttgaatgagaaaggaactacattaggactgaatgtaacaaattctgattcatggggagataatgagagcttttcgctgtctcagactacttatttcaagctggaagacaagaatgggaatgattcggtactttatcgaaaccaatatataaagtctcctcagacaaataatcagtggagggtaggagtcagctttactcaaccgattggcaagaaggtgcatttccgggcagcatataattggaatacacagtatgaacgggacaaccgtgatacgtatgaattgtcttccatgacaaaccgggattctttcggtgatttgcctgcaggttatgaggcggggtatgtggatagtttaagtaataggagtcatagccgcagtaatgggcacgacttgaatgtaggcttcaattattcggatgatacttggatgtttaatgcttcgttgggtgtcactccgcagaagcgtactattgatcggaaagtcggaaaactttatgcggacaccacaatgcgtacgattgattatcagcctatgatatggctgagttggcggaaaaagaaaatgcgtgtcagtcttaattataacggaagaacccggcagccttctttatcggacttaatgccgttgacggataatagcgatccgttgtatattactcgtggaaatccggatttgaaacagatgtttatgcatactatgcatgtgagttttcaacatccttcaaagggaatatccgccaatctgggatggcagatggagaagaacagtgtcacacaagttgttctctatgatgtgcagaccggtggacgggagacataccctataaatatcaatggaaattggaatacatatggcagtgctgactggtggaagcgtttcgggcatttttctttaaaactgagtacctccggaagacatagtaatcgtgtcagtatgattaatgaggatagaagtcaacagccggagaaaagcacaacacgtgataccgggttgaattgcgagatggcagcttcttatcagcccacttggggagggtttgatttttctacttcatgggattatcagtattcacttaattctctgaatgataataatacctatacccgctattataatttccgttttgacggctatgtggattttcctttcgggttacagttgcgtacggatgcaggctatatcttgcgtagcgggacaaatatccagaaaggagaggatgatgagattgtgtggaatgcgagggcaacctggcgattcctgaaacagagaaaagccgaattgtctgcttgttgggcggatattcttggtaaacggaaaagttatgctcgtatggctacttccgacgggttttatgagtctcggacgcaggaaataaaaggatattttattgtaactttcaaatataactttcgtctgatgatgtgagttttagaaataattcgtatgtttgctaccaaaccataaaacaaaatgtactatgagcggtagctatgtcattaatatcggtcgccagttaggtagtggcggaaaagaaataggagagaagttggcagcccgtttgggcatcgacttctatgataaagagttgatcaatctagcttctgaagagagcggattgtgtagagaattttttgaaaaagcggatgaaaaggcttcacaaggtattatcggtgggttgttcggaatgcggttcccttttattagtgagggggctatgccgtgtaccaactgtttgagcaatgatgctttgtttaaggtgcagagtgatgttattcgtcatttggcggctgaaaaatcctgtgtgtttgtggggcgctgtgcagattatatattgcgcgaacatccgcgttgtgtaaacgtttttatttcggcttccaaagaagaccgcattgcacggttgtgtcagatccatcatattgatgaggaggctgcggaggaaatgatggagaaagcagataagaaacgttcggaatactataattattatagttataaaacatggggagcggcagctacttatcatctgtgtgtggactcctcttctttaggaatagaagaaacggtacgctttgtggaggagtttgtagtgaagaaactgaagttgtaatatatggtataatgaataaaggaagataaaacagtaaagccggcatattctacttaaaagaatagagccgactttactatttataagctaagcttgatttacatcattgttaataatatcatctgtcccgttaggatacggaggaacatagatagcggataaaccgtcgaataccctacggccggagcgtcaccggcagttgtctggttggcataagccagtgcgggaggatcggtattactaccggctatcaatcccatcagagtgaagtagtttaccttataatacagtcgggcaatagcgccgataataagcaatggaatgacggtgataaggaaaccgcaacctacgtataacaatccgtcaccttcgactaccgtttgcacaaaattggcacctgcatcaataccgacactggcaaggaaaagcacgatacctatttcgcgaagcattaggttagcgctcattgttgtataagttaccagatggagtttgtgaccgaagcgtccgataaggatcgctactaccagcggaccacctgccaaacctagtttcaaaggagtcggcatacccgggaatgcaatcggaaggctgcctagaagaatacctaagaagataccgacgaagatagttacgatattcggagtgtccagacgtttcaactgattacccaacacacctgccacacgttctactgcatcttgctggcctactaccatcacacggtcacctacttgaagtaccagattcggatcggcaaacaggtccataccggaacggttgatacgggttacatttaccccatacatactgcgaaagtgcatagaaccgagcgtttttccgttaatttccggtttggtgaccaagatacggcgtgaaaccatcggcaggtcttgtttctcccaatcgagttccacctcttttcctataaatacggtgatagccggagcatcctcttccgagcagacgataaacaactgatcgcccatattgaatatggtctcgtggtcgggaatactgacgtgcccttcatggcggatacgcgaacaaacgaagttgcgtcccaagaactctttaatctcgatcagtgtctttccgctgattgattcgttgcgtacctcaaggctcatcatgtgtggcttgtggtgtgcgtccccgctttgaatcttcagattctcttcttccttagccatattgacacggaagatgtagcggatagcaatgatagaaccgataatacctaccacaccgagcggatatgcacacgcataacccaacgcgatctgcggaccggtatagttcaactggttcaatgcttcattggcggcaccaagtcccggagtgtttgtcacagctccatagagtataccaaccatcatcggcaattccacccggccgttccacaggtaataaagccccagcgcaacagcaatatttaacactacgatgcctacagccaacaggtttagtgtcattccccctttcttgaaagaagagaagaaagacggccccacctgaagaccgatacagaatacgaacaaaatcaatccgaattcacggatgaaatgtaggatgtgtgtatcggccgtgaagccgaaatgtcccattaggatgccggcaaacaaaacaaacgtgacacctaaagatactccgaatatctttatcttaccgagatacacaccggctgccactacaaatgcgtagaggagcacgatatgtgccacagaactagggtcccacaataaactttgtaaccaatccataatttatagtagtttttataatgtcttttataaaacgggtgcaaaattactcataacattggagcaaatcaaataaatgaagaactaaaaatgaaaaatgaagaatttctatacctattgtatatatgggatgaataatggtaatttttcatttcccatttcctattcttcattttccgggctgtgcgaattttccctaaaaaagagtattgttttaactatttggttatatttgcaagtcgaacaacggacatttagagagatagataaaaataaagacaatattaatcttgttttaattttaaataaactatggcagacaaaaaagaaaaactcttctcagacttttctccagtctccaccgaacaatggatggagaaggttacagccgatttgaaaggtgctgattttgagaagaagctcgtttggaaaacgaacgaagggttcaaagtgaaacctttctaccggatggaagatctggagggtttgaagactaccgatgcgcttccaggagaattcccttatttgaggggaaccaagaaagacaacaatgagtggctggttcgtcaggaaatcagagtggaatgcccgaaagaagctaatgcaaaggcgttggatatcttgaataagggtgtcgattcactttctttccatgtgaaagcaaaggaactcaatgcggaatatcttgaaacattgttgaatgatattcaagctgagtgcgttgaactgaacttctctacttgccagggacacgtcgttgagttggctaatctgctggtagcttatttccagaagaaagattatgatgtgaagaaactgagaggttctataaactatgatttcttcaataagatgttgactcgcggtaaggaaaaaggcgatatggtgcaaacgggcaaagctttgattgaggccatccaaccgcttcctttctatcgtgtactgaatgtaaatgctttatctctgaacaatgccggagcttatatttctcaggagttgggttatgcgctggcttggggtaatgaatacatgaatcaactgacagaggccggtattcccgctgctattgttgccaagaaaatcaagttcaacttcggtatcagctccaattacttcctcgaaattgcaaaattccgtgccgcacgtctgctttgggcgaatatcgtagcttcttataagcccgaatgtgtacgtgattgcgacaataaaggtcctaacggtgaatgccgttgcgctgcaaaaatggcggttcacgccgaaacttccacattcaatcttactttgtttgatgcacatgtgaatctgcttcgtacgcaaaccgaagcgatgagtgctgctttgggaggtgtggattcaatgacagttactccatttgacaagacatacgagacccctgatgaattctccgagcgtctggcacgcaaccagcaattgctgctgaaggaagaatctcattttgataaagtgattgacccggctgcaggttcttattatattgaaaacctgactgtctctatcgctaaacaggcctgggagctcttcctgtctgtcgaagaagccggtggtttctatgctgccttgaaagcggggacagttcaggctgctgtgaacgaaagcaataaagcgcgtcataaagcggtggcacagcgtcgtgaagtattgttgggcaccaaccaattccccaactttaatgaaaaagcgggtgacaagaaaccggttgaggcaaaatgttgttgtggcggtggcaaagaacatacttgcgagaaagatgtggctactttggtatccgaccgtgctgccagcgaattcgaggctttacgtcttgagacggaagcgtccggcaaacgtccgaaagcgttcatgttgactatcggtaatctggcaatgcgtcaggcacgtgcacaatactcttgcaacttcctggcttgtgccggttatgaagtgattgataatctgggcttcgaaacagttgaggcaggaatagaggcggctatggctgctaaggcggatatcgtagtgctttgttccagtgatgatgaatatgcggaatatgcaattcccgcttttaaagctttgaatggccgtgctatgtttatcatcgccggtaatccggaatgtgccgatacattgaaagccgcaggtattgagtactttatccatgtccgtgtcaatgtgctggataccttgaaagagtttaacgccaaactattgaagtaagatgagaaaagattttaaaaacattgatatatatgccgcatttcagcctgctaacggtgctgaatggcaaaaggctaacggtatctccgctgattggaaaacaccggaacacatcgaagtgaagcctgtttatacaaaagaagaccttgaaggaatggaacatctcggctatgctgccggacttcctccgtacctgcgtggtccgtactcggtaatgtacactctgcgtccttggacgatccgtcaatacgccggattttccactgccgaagaatcaaatgctttctatcgccgtaacctggcttccggtcagaaggggttgtcggttgcattcgacttggctacgcatcgcggctacgaccccgatcacgaacgtgtggtaggtgacgtaggtaaagcgggtgtatctatctgttctttggaaaacatgaaggtcctgttcgatggtattcctttgaacaagatgtccgtatccatgacaatgaacggggcggtgcttccggttatggcattctacatcaatgcgggtctggagcaaggtgcgaaattggaagaaatggctggtactatccaaaatgatatcctgaaagaattcatggtgcgtaatacctatatttatccgcctgcattctcaatgaaaattatttccgacatctttgagtatacttcgcagaagatgcctaagttcaactccatctccatttccggttaccatatgcaggaagcaggtgctaccgcagatattgagttggcttatacgcttgccgacggtctcgaatatcttcgtgccggaactgccgccggtattgatatcgatgcatttgctccgcgtctgtctttcttctgggcgattgggacgaaccatttcatggaaattgccaagatgcgtgccgcgcgtatgttgtgggcgaagattgtgaaacagtttaacccgaagaatccgaaatcattggcactgcgtacccactcacagacttccggttggtcattgaccgaacaggatccgttcaataacgtaggacgtacttgtatcgaagctatggctgccgctttgggacatacacagtctttgcataccaatgcgttggatgaggctatcgcacttccaacggacttctccgcacgtattgcccgtaacactcagatctacattcaggaagaaacatacatttgcaagaatgttgatccgtggggcggttcttattatgtagagactctgacgaatgagttggcgcataaggcttgggagcatattcaggagattgaaaaactgggtggcatggcaaaagctatcgaaacaggtattcctaagatgcgtatcgaagaggccgctgcacgtacacaagctcgtatcgacagtggtcagcagacgattgtcggtgtgaacaagtatcgtctggacaaagaagctccgattgatattcttgaaattgataatacggcggttcgtcttgaacagatcgaaaacctgaaacgtctgaaagagggacgtaaccaggctgaggtagataaagcgttggcggctattaccgaatgtgtgaagaccggtaagggtaacttgttggaactggcagtggaggcagcgcgcgtccgtgccacattgggcgagatttcatctgcttgcgaacaggtcgtaggacgttataaagcaataattagaactatatcaggcgtgtattcatcagaaagtaaaaacgatagcgacttcaagcgtgcttgtgaactggctgagaagtttgcgaagaaagaggggcgtcaaccccgtatcatgattgcgaagatgggacaggacggtcacgaccgtggtgccaaagtggtagcgaccggttatgccgactgcggttttgacgtggatatgggaccgttgttccagacacctgcggaagctgcacgtgaagctgttgaaaacgatgttcatgtagtcggtgtttcttcgttggctgccggacataagacattggttccgcagattattgaggaattaaagaagctgggtcgcgaagatatcgtagtgattgccggtggcgttattcctgcacaggattatgatttcttgtataaagcaggggtggctgctatcttcggtccgggtactccggtggcgaaagctgcttgccagattttggaaatcctgatggacgaagaataagacaggactttcctgtttttgattttatcccgcct
